(19) United States
(12) Patent Application Publication
(10) Pub. No.: US 2023/0340473 A1
(43) Pub. Date: Oct. 26, 2023

(54) SIRNA THERAPY FOR TRANSTHYRETIN (TTR) RELATED OCULAR AMYLOIDOSIS

(71) Applicant: Alnylam Pharmaceuticals, Inc., Cambridge, MA (US)

(72) Inventors: Yukio Ando, Kumamoto (JP); Hirofumi Jono, Kumamoto (JP); Rene Alvarez, Boxborough, MA (US); Dinah Wen-yee Sah, Boston, MA (US)

(21) Appl. No.: 17/978,295

(22) Filed: Nov. 1, 2022

Related U.S. Application Data
(63) Continuation of application No. 16/565,318, filed on Sep. 9, 2019, now abandoned.
Application No. 16/565,318 is a continuation of application No. 15/660,697, filed on Jul. 26, 2017, now abandoned.
Application No. 15/660,697 is a continuation of application No. 15/203,379, filed on Jul. 6, 2016, now abandoned.
Application No. 15/203,379 is a continuation of application No. 14/807,852, filed on Jul. 23, 2015, now abandoned.
Application No. 14/807,852 is a continuation of application No. 13/636,594, filed on May 2, 2013, now abandoned.

(51) Int. Cl. C12N 15/113; A61K 31/7088; C07H 21/02; A61K 47/54; A61K 9/00; A61K 9/127; A61K 9/10; A61K 9/06; C07J 43/00; A61K 31/713; C12N 5/079; C12Q 1/6883

(52) U.S. Cl. CPC C12N 15/113; A61K 31/7088; C07H 21/02; A61K 47/554; A61K 9/0019; A61K 9/1271; A61K 9/0051; A61K 9/1272; A61K 9/10; A61K 9/06; C07J 43/00; A61K 9/0048; A61K 31/713; C12N 5/0621; C12Q 1/6883; C12N 2310/14; C12N 2310/3515; C12N 2310/17; C12N 2310/314; C12N 2310/321; C12N 2310/346; C12N 2320/30; C12N 2503/02; C12Q 2600/158; C12Q 2600/178

(57) ABSTRACT

The invention relates to a method of treating ocular amyloidosis by reducing TTR expression in a subject by administering a double-stranded ribonucleic acid (dsRNA) that targets a TTR gene to the retinal pigment epithelium of the subject.

### CROSS REFERENCE TO RELATED APPLICATIONS

[0001] This application is a continuation of U.S. patent application Ser. No. 16/565,318, filed on Sep. 9, 2019; which is a continuation of Ser. No. 15/660,697, filed Jul. 26, 2017 (abandoned); which is a continuation of U.S. patent application Ser. No. 15/203,379, filed Jul. 6, 2016, (abandoned); which is a continuation of U.S. patent application Ser. No. 14/807,852, filed Jul. 23, 2015 (abandoned); which is a continuation of U.S. patent application Ser. No. 13/636,594, with a 371(c) date of May 2, 2013 (abandoned); which is a 371 national phase entry application of international application no. PCT/US2011/030392, filed Mar. 29, 2011; which claims the benefit of U.S. Provisional Application No. 61/318,704, filed Mar. 29, 2010 and U.S. Provisional Application No. 61/318,702, filed Mar. 29, 2010. The entire contents of each of the foregoing applications are incorporated herein by reference.

### FIELD OF THE INVENTION

[0002] The invention relates to methods for treating TTR related ocular amyloidosis with siRNA.

### SEQUENCE LISTING

[0003] The instant application contains a Sequence Listing which has been submitted electronically in XML file format and is hereby incorporated by reference in its entirety. Said XML copy, created on Jan. 30, 2023, is named 121301-19108_SL.xml and is 4,158,666 bytes in size.

### BACKGROUND OF THE INVENTION

[0004] Transthyretin (TTR) is a secreted thyroid hormone-binding protein. TTR binds and transports retinol binding protein (RBP)/Vitamin A, and serum thyroxine (T4) in plasma and cerebrospinal fluid.

[0005] Both normal-sequence TTR and variant-sequence TTR cause amyloidosis. Normal-sequence TTR causes cardiac amyloidosis in people who are elderly and is termed senile systemic amyloidosis (SSA) (also called senile cardiac amyloidosis (SCA)). SSA often is accompanied by microscopic deposits in many other organs. TTR mutations accelerate the process of TTR amyloid formation and are the most important risk factor for the development of clinically significant TTR amyloidosis (also called ATTR (amyloidosis-transthyretin type)). More than 85 amyloidogenic TTR variants are known to cause systemic familial amyloidosis. The liver is the major site of TTR expression. Other significant sites of expression include the choroid plexus, retina and pancreas.

[0006] TTR amyloidosis manifests in various forms. When the peripheral nervous system is affected more prominently, the disease is termed familial amyloidotic polyneuropathy (FAP). When the heart is primarily involved but the nervous system is not, the disease is called familial amyloidotic cardiomyopathy (FAC). A third major type of TTR amyloidosis is called leptomeningeal/CNS (Central Nervous System) amyloidosis.

[0007] Double-stranded RNA molecules (dsRNA) have been shown to block gene expression in a highly conserved regulatory mechanism known as RNA interference (RNAi). WO 99/32619 (Fire et al.) disclosed the use of a dsRNA of at least 25 nucleotides in length to inhibit the expression of genes in C. elegans. dsRNA has also been shown to degrade target RNA in other organisms, including plants (see, e.g., WO 99/53050, Waterhouse et al.; and WO 99/61631, Heifetz et al.), Drosophila (see, e.g., Yang, D., et al., Curr. Biol. (2000) 10:1191-1200), and mammals (see WO 00/44895, Limmer; and DE 101 00 586.5, Kreutzer et al.).

[0008] U.S. 20070207974 discloses functional and hyperfunctional siRNAs. U.S. 20090082300 discloses antisense molecules directed against TTR. U.S. Pat. No. 7,250,496 discloses microRNAs directed against TTR.

### SUMMARY OF THE INVENTION

[0009] The invention provides a method for reducing transthyretin (TTR) expression in the retinal pigment epithelium (RPE) of a subject by administering a sufficient amount of a double stranded ribonucleic acid (dsRNA) to the retina of the subject. In some embodiments, the dsRNA is AD-18324 or AD-18534. The dsRNA can be conjugated to, e.g., cholesterol.

[0010] In one embodiment, the subject is a human. In another embodiment, the subject is a human in need of treatment for TTR-related ocular amyloidosis. In yet another embodiment, the dsRNA is AD-18324. In a related embodiment, the method results in reduced TTR expression in the RPE. In another related embodiment, the method results in reduced TTR mRNA expression by at least 40% or by at least 60% compared to a control. In other embodiments, the administration of the dsRNA does not result in an inflammatory response in the human as measured by IL-6 or TNF-alpha levels.

[0011] In another embodiment, the subject is a human possessing a ATTR (amyloidogenic transthyretin) V30M gene in need of treatment for TTR-related ocular amyloidosis. In one embodiment, the dsRNA administered to the ATTR V30M subject is AD-18324. In a related embodiment, the method results in a reduction of V30M TTR expression in the retinal pigment epithelium. In another embodiment, the method results in reduction of V30M TTR mRNA expression by at least 60% compared to a control. In other embodiments, the administration of the dsRNA does not result in an inflammatory response in the human possessing a ATTR V30M gene as measured by IL-6 or TNF-alpha levels.

[0012] In another embodiment, the subject is a Dark Agouti (DA) rat. In one embodiment, the dsRNA that is administered to the DA rat is AD-18534. In another embodiment, the method results in a reduction of TTR expression in the retinal pigment epithelium. In yet another embodiment, the method results in reduction of TTR mRNA expression in the DA rat by at least 60% compared to a control. In another embodiment, the administration of the dsRNA does not result in an inflammatory response in the DA rat as measured by IL-6 or TNF-alpha levels.

[0013] In some embodiments, the subject is a transgenic rat possessing a human ATTR (amyloidogenic transthyretin) V30M gene. In one embodiment, the dsRNA administered to the ATTR V30M transgenic rat is AD-18324. In a related embodiment, the method results in a reduction of TTR expression in the retinal pigment epithelium. In another embodiment, the method results in reduction of TTR mRNA expression by at least 60% compared to a control. In other embodiments, the administration of the dsRNA does not result in an inflammatory response in the ATTR V30M Tg rat as measured by IL-6 or TNF-alpha levels.

[0014] In one embodiment, the invention provides a method for treating, preventing or managing TTR-related ocular amyloidosis by administering to a patient in need of such treatment, prevention or management a therapeutically or prophylactically effective amount of AD-18324 to the retina of the patient.

[0015] In another embodiment, the invention provides a method of treating a human, which includes identifying a human diagnosed as having TTR-related ocular amyloidosis or at risk for developing TTR-related ocular amyloidosis and administering to the human a therapeutically or prophylactically effective amount of AD-18324 to the retina of the human.

[0016] In a related embodiment, the invention includes a method for inhibiting TTR expression in a retinal epithelium cell, wherein the method comprises (a) introducing into the retinal epithelium cell a dsRNA, wherein the dsRNA is AD-18324 or AD-18534, and (b) maintaining the cell produced in step (a) for a time sufficient to obtain degradation of the mRNA transcript of a TTR gene, thereby inhibiting expression of the TTR gene in the cell. In one embodiment, the dsRNA administered in this method is AD-18324. In some embodiments, the retinal epithelium cell is a human retinal pigment epithelium transgenic cell. In another embodiment, the method results in inhibition of TTR expression by at least 10%, 40%, or at least 60%. In a related embodiment, introducing the dsRNA into the retinal epithelium cell does not result in an inflammatory response as measured by IL-6 or TNF-alpha levels.

[0017] The details of one or more embodiments of the invention are set forth in the description below. Other features, objects, and advantages of the invention will be apparent from the description and the drawings, and from the claims.

### DESCRIPTION OF THE DRAWINGS

[0018] FIG. 1 is a graph of TNFalpha and IFNalpha levels in cultured human PBMCs following transfection with TTR siRNAs.

[0019] FIG. 2A and FIG. 2B are dose response curves for AD-18324 and AD-18328, respectively, in HepG2 cells.

[0020] FIG. 3 is a dose response curve for AD-18246 in HepG2 cells.

[0021] FIG. 4A and FIG. 4B show inhibition of liver mRNA and plasma protein levels, respectively, in transgenic H129-mTTR-KO/iNOS-KO/hTTR mice by an intravenous bolus administration of TTR-dsRNA (AD-18324, AD-18328 and AD-18246) formulated in LNP01.

[0022] FIG. 5 is a graph summarizing the measurements of TTR mRNA levels in livers of non-human primates following 15-minute intravenous infusion of TTR-dsRNA (AD-18324 and AD-18328) formulated in SNALP.

[0023] FIG. 6A and FIG. 6B show inhibition of human V30M TTR liver mRNA and serum protein levels, respectively, in transgenic mice by an intravenous bolus administration of SNALP-18328. Group means were determined, normalized to the PBS control group, and then plotted. Error bars represent standard deviations. The percentage reduction of the group mean, relative to PBS, is indicated for the SNALP-1955 and SNALP-18328 groups. (*** p<0.001, One-way ANOVA, with Dunn's post-hoc test).

[0024] FIG. 7A and FIG. 7B show the durability of reduction of human V30M TTR liver mRNA and serum protein levels, respectively, in transgenic mice over 22 days following a single intravenous bolus administration of SNALP-18328. Group means were determined. TTR/GAPDH mRNA levels were normalized to day 0 levels and plotted. The percent reduction of normalized TTR mRNA levels relative to SNALP-1955 for each time point were calculated and are indicated for the SNALP-18328 groups. (*** p<0.001, One-way ANOVA, with Dunn's post-hoc test).

[0025] FIG. 8 shows the timecourse of TTR serum protein levels in non-human primates over 14 days following a single 15-minute intravenous infusion of SNALP-18328.

[0026] FIG. 9 shows reduction of TTR-immunoreactivity in various tissues of human V30M TTR/HSF-1 knock-out mice following intravenous bolus administration of SNALP-18328. E, esophagus; S, stomach; I1, intestine/duodenum; I4, intestine/colon; N, nerve; D, dorsal root ganglia.

[0027] FIG. 10 shows the measurements of TTR mRNA levels in livers of non-human primates following 15-minute intravenous infusion of XTC-SNALP-18328.

[0028] FIG. 11A and FIG. 11B show the measurements of TTR mRNA and serum protein levels, respectively, in livers of non-human primates following 15-minute intravenous infusion of LNP09-18328 or LNP11-18328. FIG. 11C shows the timecourse of TTR serum protein levels over 28 days following a 15-minute intravenous infusion of 0.3 mg/kg LNP09-18328, as compared to the PBS control group.

[0029] FIG. 12 shows the sequence of human TTR mRNA (Ref. Seq. NM_000371.3, SEQ ID NO:1331).

[0030] FIG. 13A and FIG. 13B are the sequences of human and rat TTR mRNA, respectively.

[0031] FIG. 13A is the sequence of human TTR mRNA (Ref. Seq. NM_000371.2, SEQ ID NO:1329).

[0032] FIG. 13B is the sequence of rat TTR mRNA (Ref. Seq. NM_012681.1, SEQ ID NO:1330).

[0033] FIG. 14 shows the nucleotide alignment of NM_000371.3 (SEQ ID NO: 1331), NM_000371.2 (SEQ ID NO: 1329), and AD-18328 (SEQ ID NO: 1410).

[0034] FIG. 15 illustrates symptoms and mutations in TTR associated with familial amyloidotic neuropathy, familial amyloidotic cardiomyopathy and CNS amyloidosis.

[0035] FIG. 16 shows reduction of TTR mRNA levels in the liver with SNALP-18534 with different infusion durations. Groups of animals (n=4/group) were administered 1 mg/kg SNALP-18534 via a 15-minute, or 1, 2, or 3 hour infusion. Forty-eight hours later, rats were euthanized and livers harvested. TTR and GAPDH mRNA levels were measured from liver lysates using the Quantigene bDNA assay. The ratio of TTR to GAPDH mRNA levels was calculated for each animal. Group means were determined and normalized to a PBS control group, and then plotted. Error bars represent standard deviations. (*** p<0.001, One-way ANOVA with Bonferroni post-hoc test, relative to PBS).

[0036] FIG. 17 shows the measurements of TTR mRNA levels in livers of rats following 15-minute intravenous infusion of LNP07-18534 or LNP08-18534.

[0037] FIG. 18 shows in vivo inhibition of endogenous TTR mRNA levels in livers of Sprague-Dawley Rats following a 15-min IV infusion of LNP09-18534 or LNP11-18534. Groups of animals (n=4/group) were intravenously administered 0.01, 0.03, 0.1, or 0.3 mg/kg LNP09-18534, LNP-11-18534; or PBS via a 15-minute infusion. Forty-eight hours later, animals were euthanized and livers harvested. TTR and GAPDH mRNA levels were measured from liver biopsy lysates using the Quantigene bDNA assay. The ratio of TTR to GAPDH mRNA levels was calculated for each animal. Group means were determined, normalized to the PBS control group, and then plotted. Error bars represent standard deviations.

[0038] FIG. 19 shows the efficacy of LNP12 formulated siRNA targeting TTR in non-human primates. Data points represent group mean±s.d.

[0039] FIG. 20 is a graph with results from a GLP study in NHP illustrating the durability of mRNA suppression by ALN-TTR01.

[0040] FIG. 21 is a graph illustrating regression of TTR deposits in various tissues of mature animals (hV30M TTR/HSF-1 knock-out mice) following intravenous bolus administration of SNALP-18328 (ALN-TTR01).

[0041] FIG. 22 is a graph showing the effects of human TTR siRNA AD-18324 on TTR mRNA expression in ARPE 19 cells. AD-18324 was compared with rat TTR siRNA AD-18534. The human TTR mRNA expression was calculated relative to human GAPDH expression.

[0042] FIG. 23 is a graph showing the effect of AD-18534 on TTR mRNA expression in retinal pigment epithelium cells of Dark Agouti (DA) rats. AD-18534 was compared to a control siRNA group, a saline group, and no treatment group. Endogenous rat TTR mRNA expression was calculated relative to rat GAPDH expression.

[0043] FIG. 24 is a graph showing the effect of AD-18324 on ATTR mRNA expression in retinal pigment epithelium cells in ATTR V30M transgenic rats. AD-18324 was compared to a control siRNA group, a saline group, and no treatment group. Human TTR mRNA expression was calculated relative to rat GAPDH expression.

[0044] FIG. 25 is a Western blot showing the effect of human TTR siRNA on human TTR protein expression in retinal pigment epithelial cells in ATTR V30M transgenic rats compared to a control siRNA.

[0045] FIG. 26 is a graph showing the effect of AD-23043 (cho-TTR siRNA) on rat TTR mRNA expression in retinal pigment epithelium cells of Dark Agouti (DA) rats 14 and 21 days after administration. Endogenous rat TTR mRNA expression was calculated relative to rat GAPDH expression.

[0046] FIG. 27 is a graph showing the effect of AD-23043 (cho-TTR siRNA) on rat TTR mRNA expression in retinal pigment epithelium cells of Dark Agouti (DA) rats 21 days after administration. Endogenous rat TTR mRNA expression was calculated relative to rat GAPDH expression.

[0047] FIG. 28 illustrates Scheme 1 for preparation of siRNAs conjugated to a ligand such as cholesterol and vitamin E.

[0048] FIG. 29 illustrates Scheme 2 for preparation of siRNAs conjugated to a ligand such as cholesterol and vitamin E: synthesis of siRNA lipophilic conjugates. A and B are on column and C is post synthetic conjugations. (i) a. solid phase synthesis; b. deprotection and c. HPLC purification; (ii) annealing with complementary strand; (iii) a. post-synthetic conjugation to ligand and b. annealing with complementary strand. X=O or S.

### DETAILED DESCRIPTION OF THE INVENTION

[0049] The invention provides dsRNAs and methods of using the dsRNAs for inhibiting the expression of a TTR gene in a cell or a mammal where the dsRNA targets a TTR gene. The invention also provides compositions and methods for treating pathological conditions and diseases, such as a TTR amyloidosis, in a mammal caused by the expression of a TTR gene. dsRNA directs the sequence-specific degradation of mRNA through a process known as RNA interference (RNAi).

[0050] The dsRNAs of the compositions featured herein include an RNA strand (the antisense strand) having a region which is less than 30 nucleotides in length, generally 19-24 nucleotides in length, and is substantially complementary to at least part of an mRNA transcript of a TTR gene. The use of these dsRNAs enables the targeted degradation of mRNAs of genes that are implicated in pathologies associated with TTR expression in mammals. Very low dosages of TTR dsRNAs in particular can specifically and efficiently mediate RNAi, resulting in significant inhibition of expression of a TTR gene. Using cell-based assays, the present inventors have demonstrated that dsRNAs targeting TTR can specifically and efficiently mediate RNAi, resulting in significant inhibition of expression of a TTR gene. Thus, methods and compositions including these dsRNAs are useful for treating pathological processes that can be mediated by down regulating TTR, such as in the treatment of a liver disorder or a TTR amyloidosis, e.g., FAP.

[0051] The methods and compositions containing a TTR dsRNA are useful for treating pathological processes mediated by TTR expression, such as a TTR amyloidosis. In an embodiment, a method of treating a disorder mediated by TTR expression includes administering to a human in need of such treatment a therapeutically effective amount of a dsRNA targeted to TTR. In an embodiment, a dsRNA is administered to the human at about 0.01, 0.1, 0.5, 1.0, 2, 2.5, 3, 4, 5, 6, 7, 8, 9, 10, 11, 12, 13, 14, 15, 16, 17, 18, 19, 20, 21, 22, 23, 24, or 25 mg/kg.

[0052] The following detailed description discloses how to make and use the compositions containing dsRNAs to inhibit the expression of a TTR gene, as well as compositions and methods for treating diseases and disorders caused by the expression of this gene. The pharmaceutical compositions featured in the invention include a dsRNA having an antisense strand comprising a region of complementarity which is less than 30 nucleotides in length, generally 19-24 nucleotides in length, and is substantially complementary to at least part of an RNA transcript of a TTR gene, together with a pharmaceutically acceptable carrier. The compositions featured in the invention also include a dsRNA having an antisense strand having a region of complementarity which is less than 30 nucleotides in length, generally 19-24 nucleotides in length, and is substantially complementary to at least part of an RNA transcript of a TTR gene.

[0053] The sense strand of a dsRNA can include 15, 16, 17, 18, 19, 20, 21, or more contiguous nucleotides of any of the sense strands disclosed herein. The antisense strand of a dsRNA can include 15, 16, 17, 18, 19, 20, 21, or more contiguous nucleotides of any of the antisense strands disclosed herein.

[0054] In an embodiment, a dsRNA can include at least 1, 2, 3, 4, 5, 6, 7, 8, 9, 10, or more modified nucleotides. In an embodiment, a modified nucleotide can include a 2′-O-methyl modified nucleotide, a nucleotide comprising a 5′-phosphorothioate group, and/or a terminal nucleotide linked to a cholesteryl derivative or dodecanoic acid bisdecylamide group. In an embodiment, a modified nucleotide can include a 2′-deoxy-2′-fluoro modified nucleotide, a 2′-deoxy-modified nucleotide, a locked nucleotide, an abasic nucleotide, 2′-amino-modified nucleotide, 2′-alkyl-modified nucleotide, morpholino nucleotide, a phosphoramidate, and/or a non-natural base comprising nucleotide.

[0055] In an embodiment, the region of complementary of a dsRNA is at least 10, 11, 12, 13, 14, 15, 16, 17, 18, 19, 20, 21, or more nucleotides in length. In an embodiment, the region of complementary includes 10, 11, 12, 13, 14, 15, 16, 17, 18, 19, 20, 21, or more contiguous nucleotides of SEQ ID NO:169.

[0056] In an embodiment, each strand of a dsRNA is 15, 16, 17, 18, 19, 20, 21, 22, 23, 24, 25, 26, 27, 28, 29, 30 or more nucleotides in length. In an embodiment, the dsRNA includes a sense strand, or 10, 11, 12, 13, 14, 15, 16, 17, 18, 19, 20, or 21 nucleotide fragment thereof, selected from Tables 3A, 3B, 4, 6A, 6B, 7, and 16, and an antisense strand, or 10, 11, 12, 13, 14, 15, 16, 17, 18, 19, 20, or 21 nucleotide fragment thereof, selected from Tables 3A, 3B, 4, 6A, 6B, 7, and 16.

[0057] In an embodiment, administration of a dsRNA to a cell results in about 40%, 45%, 50%, 55%, 60%, 65%, 70%, 75%, 80%, 90%, 95% or more inhibition of TTR mRNA expression as measured by a real time PCR assay. In an embodiment, administration of a dsRNA to a cell results in about 40% to 45%, 45% to 50%, 50% to 55%, 55% to 60%, 60% to 65%, 65% to 70%, 70% to 75%, 75% to 80%, 80% to 85%, 85% to 90%, 90% to 95% or more inhibition of TTR mRNA expression as measured by a real time PCR assay. In an embodiment, administration of a dsRNA to a cell results in about 40%, 45%, 50%, 55%, 60%, 65%, 70%, 75%, 80%, 90%, 95% or more inhibition of TTR mRNA expression as measured by a branched DNA assay. In an embodiment, administration of a dsRNA to a cell results in about 40% to 45%, 45% to 50%, 50% to 55%, 55% to 60%, 60% to 65%, 65% to 70%, 70% to 75%, 75% to 80%, 80% to 85%, 85% to 90%, 90% to 95% or more inhibition of TTR mRNA expression as measured by a branched DNA assay.

[0058] In an embodiment, a dsRNA has an IC50 of less than 0.01 pM, 0.1 pM, 1 pM, 5 pM, 10 pM, 100 pM, or 1000 pM. In an embodiment, a dsRNA has an ED50 of about 0.01, 0.1, 1, 5, or 10 mg/kg.

[0059] In an embodiment, administration of a dsRNA can reduce TTR mRNA by about 40%, 45%, 50%, 55%, 60%, 65%, 70%, 75%, 80%, 90%, 95% or more in cynomolgus monkeys. In an embodiment, administration of a dsRNA reduces liver TTR mRNA levels by about 40%, 45%, 50%, 55%, 60%, 65%, 70%, 75%, 80%, 90%, 95% or more or serum TTR protein levels by about 40%, 45%, 50%, 55%, 60%, 65%, 70%, 75%, 80%, 90%, 95% or more. In an embodiment, administration of a dsRNA reduces liver TTR mRNA levels and/or serum TTR protein levels up to 1, 2, 3, 4, 5, 6, 7, 8, 9, 10, 11, 12, 13, 14, 15, 16, 17, 18, 19, 20, 21, 22, 23, 24, 25, or more days.

[0060] In an embodiment, a dsRNA is formulated in a LNP formulation and reduces TTR mRNA levels by about 40%, 45%, 50%, 55%, 60%, 65%, 70%, 75%, 80%, 90%, 95% or more at a dose of 0.1, 0.2, 0.3, 0.4, 0.5, 0.6, 0.7, 0.8, 0.9, or 1 mg/kg, relative to a PBC control group. In an embodiment, a dsRNA is formulated in a LNP formulation and reduces TTR protein levels about 40%, 45%, 50%, 55%, 60%, 65%, 70%, 75%, 80%, 90%, 95% or more relative to a PBC control group as measured by a western blot. In an embodiment, a dsRNA suppresses serum TTR protein levels up to day 1, 2, 3, 4, 5, 6, 7, 8, 9, 10, 11, 12, 13, 14, 15, 16, 17, 18, 19, 20, 21, 22, 23, 24, or 25 post-treatment when administered to a subject in need thereof at 1, 2, 3, 4, 5, 6, 7, 8, 9, 10, 11, 12, 13, 14, 15, 16, 17, 18, 19, 20, 21, 22, 23, 24, or 25 mg/kg.

[0061] Accordingly, in some aspects, pharmaceutical compositions containing a TTR dsRNA and a pharmaceutically acceptable carrier, methods of using the compositions to inhibit expression of a TTR gene, and methods of using the pharmaceutical compositions to treat diseases caused by expression of a TTR gene are featured in the invention.

### I. Definitions

[0062] For convenience, the meaning of certain terms and phrases used in the specification, examples, and appended claims, are provided below. If there is an apparent discrepancy between the usage of a term in other parts of this specification and its definition provided in this section, the definition in this section shall prevail.

[0063] “G,” “C,” “A” and “U” each generally stand for a nucleotide that contains guanine, cytosine, adenine, and uracil as a base, respectively. “T” and “dT” are used interchangeably herein and refer to a deoxyribonucleotide wherein the nucleobase is thymine, e.g., deoxyribothymine. However, it will be understood that the term “ribonucleotide” or “nucleotide” or “deoxyribonucleotide” can also refer to a modified nucleotide, as further detailed below, or a surrogate replacement moiety. The skilled person is well aware that guanine, cytosine, adenine, and uracil may be replaced by other moieties without substantially altering the base pairing properties of an oligonucleotide comprising a nucleotide bearing such replacement moiety. For example, without limitation, a nucleotide comprising inosine as its base may base pair with nucleotides containing adenine, cytosine, or uracil. Hence, nucleotides containing uracil, guanine, or adenine may be replaced in the nucleotide sequences of the invention by a nucleotide containing, for example, inosine. Sequences comprising such replacement moieties are embodiments of the invention.

[0064] As used herein, “transthyretin” (“TTR”) refers to a gene in a cell. TTR is also known as ATTR, HsT2651, PALB, prealbumin, TBPA, and transthyretin (prealbumin, amyloidosis type I). The sequence of a human TTR mRNA transcript can be found at NM_000371. The sequence of mouse TTR mRNA can be found at NM_013697.2, and the sequence of rat TTR mRNA can be found at NM_012681.1.

[0065] As used herein, “target sequence” refers to a contiguous portion of the nucleotide sequence of an mRNA molecule formed during the transcription of a TTR gene, including mRNA that is a product of RNA processing of a primary transcription product.

[0066] As used herein, the term “strand comprising a sequence” refers to an oligonucleotide comprising a chain of nucleotides that is described by the sequence referred to using the standard nucleotide nomenclature.

[0067] As used herein, and unless otherwise indicated, the term “complementary,” when used to describe a first nucleotide sequence in relation to a second nucleotide sequence, refers to the ability of an oligonucleotide or polynucleotide comprising the first nucleotide sequence to hybridize and form a duplex structure under certain conditions with an oligonucleotide or polynucleotide comprising the second nucleotide sequence, as will be understood by the skilled person. Such conditions can, for example, be stringent conditions, where stringent conditions may include: 400 mM NaCl, 40 mM PIPES pH 6.4, 1 mM EDTA, 50° C. or 70° C. for 12-16 hours followed by washing. Other conditions, such as physiologically relevant conditions as may be encountered inside an organism, can apply. The skilled person will be able to determine the set of conditions most appropriate for a test of complementarity of two sequences in accordance with the ultimate application of the hybridized nucleotides.

[0068] This includes base-pairing of the oligonucleotide or polynucleotide comprising the first nucleotide sequence to the oligonucleotide or polynucleotide comprising the second nucleotide sequence over the entire length of the first and second nucleotide sequence. Such sequences can be referred to as “fully complementary” with respect to each other herein. However, where a first sequence is referred to as “substantially complementary” with respect to a second sequence herein, the two sequences can be fully complementary, or they may form one or more, but generally not more than 4, 3 or 2 mismatched base pairs upon hybridization, while retaining the ability to hybridize under the conditions most relevant to their ultimate application. However, where two oligonucleotides are designed to form, upon hybridization, one or more single stranded overhangs, such overhangs shall not be regarded as mismatches with regard to the determination of complementarity. For example, a dsRNA comprising one oligonucleotide 21 nucleotides in length and another oligonucleotide 23 nucleotides in length, wherein the longer oligonucleotide comprises a sequence of 21 nucleotides that is fully complementary to the shorter oligonucleotide, may yet be referred to as “fully complementary” for the purposes described herein.

[0069] “Complementary” sequences, as used herein, may also include, or be formed entirely from, non-Watson-Crick base pairs and/or base pairs formed from non-natural and modified nucleotides, in as far as the above requirements with respect to their ability to hybridize are fulfilled. Such non-Watson-Crick base pairs includes, but not limited to, G:U Wobble or Hoogstein base pairing.

[0070] The terms “complementary,” “fully complementary” and “substantially complementary” herein may be used with respect to the base matching between the sense strand and the antisense strand of a dsRNA, or between the antisense strand of a dsRNA and a target sequence, as will be understood from the context of their use.

[0071] As used herein, a polynucleotide that is “substantially complementary to at least part of” a messenger RNA (mRNA) refers to a polynucleotide that is substantially complementary to a contiguous portion of the mRNA of interest (e.g., an mRNA encoding TTR) including a 5′ UTR, an open reading frame (ORF), or a 3′ UTR. For example, a polynucleotide is complementary to at least a part of a TTR mRNA if the sequence is substantially complementary to a non-interrupted portion of an mRNA encoding TTR.

[0072] The term “double-stranded RNA” or “dsRNA,” as used herein, refers to a complex of ribonucleic acid molecules, having a duplex structure comprising two anti-parallel and substantially complementary, as defined above, nucleic acid strands. In general, the majority of nucleotides of each strand are ribonucleotides, but as described in detail herein, each or both strands can also include at least one non-ribonucleotide, e.g., a deoxyribonucleotide and/or a modified nucleotide. In addition, as used in this specification, “dsRNA” may include chemical modifications to ribonucleotides, including substantial modifications at multiple nucleotides and including all types of modifications disclosed herein or known in the art. Any such modifications, as used in an siRNA type molecule, are encompassed by “dsRNA” for the purposes of this specification and claims.

[0073] The two strands forming the duplex structure may be different portions of one larger RNA molecule, or they may be separate RNA molecules. Where the two strands are part of one larger molecule, and therefore are connected by an uninterrupted chain of nucleotides between the 3′-end of one strand and the 5′-end of the respective other strand forming the duplex structure, the connecting RNA chain is referred to as a “hairpin loop.” Where the two strands are connected covalently by means other than an uninterrupted chain of nucleotides between the 3′-end of one strand and the 5′-end of the respective other strand forming the duplex structure, the connecting structure is referred to as a “linker.” The RNA strands may have the same or a different number of nucleotides. The maximum number of base pairs is the number of nucleotides in the shortest strand of the dsRNA minus any overhangs that are present in the duplex. In addition to the duplex structure, a dsRNA may comprise one or more nucleotide overhangs. The term “siRNA” is also used herein to refer to a dsRNA as described above.

[0074] As used herein, a “nucleotide overhang” refers to the unpaired nucleotide or nucleotides that protrude from the duplex structure of a dsRNA when a 3′-end of one strand of the dsRNA extends beyond the 5′-end of the other strand, or vice versa. “Blunt” or “blunt end” means that there are no unpaired nucleotides at that end of the dsRNA, i.e., no nucleotide overhang. A “blunt ended” dsRNA is a dsRNA that is double-stranded over its entire length, i.e., no nucleotide overhang at either end of the molecule.

[0075] The term “antisense strand” refers to the strand of a dsRNA which includes a region that is substantially complementary to a target sequence. As used herein, the term “region of complementarity” refers to the region on the antisense strand that is substantially complementary to a sequence, for example a target sequence, as defined herein. Where the region of complementarity is not fully complementary to the target sequence, the mismatches are most tolerated in the terminal regions and, if present, are generally in a terminal region or regions, e.g., within 6, 5, 4, 3, or 2 nucleotides of the 5′ and/or 3′ terminus.

[0076] The term “sense strand,” as used herein, refers to the strand of a dsRNA that includes a region that is substantially complementary to a region of the antisense strand.

[0077] As used herein, the term “SNALP” refers to a stable nucleic acid-lipid particle. A SNALP represents a vesicle of lipids coating a reduced aqueous interior comprising a nucleic acid such as a dsRNA or a plasmid from which a dsRNA is transcribed. SNALP are described, e.g., in U.S. Patent Application Publication Nos. 20060240093, 20070135372, and U.S. Ser. No. 61/045,228 filed on Apr. 15, 2008. These applications are hereby incorporated by reference.

[0078] “Introducing into a cell,” when referring to a dsRNA, means facilitating uptake or absorption into the cell, as is understood by those skilled in the art. Absorption or uptake of dsRNA can occur through unaided diffusive or active cellular processes, or by auxiliary agents or devices. The meaning of this term is not limited to cells in vitro; a dsRNA may also be “introduced into a cell,” wherein the cell is part of a living organism. In such instance, introduction into the cell will include the delivery to the organism. For example, for in vivo delivery, dsRNA can be injected into a tissue site or administered systemically. In vitro introduction into a cell includes methods known in the art such as electroporation and lipofection. Further approaches are described herein or known in the art.

[0079] The terms “silence,” “inhibit the expression of,” “down-regulate the expression of,” “suppress the expression of and the like in as far as they refer to a TTR gene, herein refer to the at least partial suppression of the expression of a TTR gene, as manifested by a reduction of the amount of mRNA which may be isolated from a first cell or group of cells in which a TTR gene is transcribed and which has or have been treated such that the expression of a TTR gene is inhibited, as compared to a second cell or group of cells substantially identical to the first cell or group of cells but which has or have not been so treated (control cells). The degree of inhibition is usually expressed in terms of

$$\frac{( mRNA in control cells ) - ( mRNA in treated cells )}{( mRNA in control cells )} \cdot 100 \%$$

[0080] Alternatively, the degree of inhibition may be given in terms of a reduction of a parameter that is functionally linked to TTR gene expression, e.g., the amount of protein encoded by a TTR gene which is secreted by a cell, or the number of cells displaying a certain phenotype, e.g., apoptosis. In principle, TTR gene silencing may be determined in any cell expressing the target, either constitutively or by genomic engineering, and by any appropriate assay. However, when a reference is needed in order to determine whether a given dsRNA inhibits the expression of a TTR gene by a certain degree and therefore is encompassed by the instant invention, the assays provided in the Examples below shall serve as such reference.

[0081] For example, in certain instances, expression of a TTR gene is suppressed by at least about 5%, 10%, 15%, 20%, 25%, 30%, 35%, 40%, 45%, or 50% by administration of the double-stranded oligonucleotide featured in the invention. In some embodiments, a TTR gene is suppressed by at least about 60%, 70%, or 80% by administration of the double-stranded oligonucleotide featured in the invention. In some embodiments, a TTR gene is suppressed by at least about 85%, 90%, or 95% by administration of the double-stranded oligonucleotide featured in the invention.

[0082] As used herein in the context of TTR expression, the terms “treat,” “treatment,” and the like, refer to relief from or alleviation of pathological processes mediated by TTR expression. In the context of the present invention insofar as it relates to any of the other conditions recited herein below (other than pathological processes mediated by TTR expression), the terms “treat,” “treatment,” and the like mean to relieve or alleviate at least one symptom associated with such condition, or to slow or reverse the progression of such condition, such as the slowing the progression of a TTR amyloidosis, such as FAP. Symptoms of TTR amyloidosis include sensory neuropathy (e.g. paresthesia, hypesthesia in distal limbs), autonomic neuropathy (e.g., gastrointestinal dysfunction, such as gastric ulcer, or orthostatic hypotension), motor neuropathy, seizures, dementia, myelopathy, polyneuropathy, carpal tunnel syndrome, autonomic insufficiency, cardiomyopathy, vitreous opacities, renal insufficiency, nephropathy, substantially reduced mBMI (modified Body Mass Index), cranial nerve dysfunction, and corneal lattice dystrophy.

[0083] As used herein, the phrases “therapeutically effective amount” and “prophylactically effective amount” refer to an amount that provides a therapeutic benefit in the treatment, prevention, or management of pathological processes mediated by TTR expression or an overt symptom of pathological processes mediated by TTR expression. The specific amount that is therapeutically effective can be readily determined by an ordinary medical practitioner, and may vary depending on factors known in the art, such as, for example, the type of pathological processes mediated by TTR expression, the patient's history and age, the stage of pathological processes mediated by TTR expression, and the administration of other anti-pathological processes mediated by TTR expression agents.

[0084] As used herein, a “pharmaceutical composition” comprises a pharmacologically effective amount of a dsRNA and a pharmaceutically acceptable carrier. As used herein, “pharmacologically effective amount,” “therapeutically effective amount” or simply “effective amount” refers to that amount of an RNA effective to produce the intended pharmacological, therapeutic or preventive result. For example, if a given clinical treatment is considered effective when there is at least a 25% reduction in a measurable parameter associated with a disease or disorder, a therapeutically effective amount of a drug for the treatment of that disease or disorder is the amount necessary to effect at least a 25% reduction in that parameter. For example, a therapeutically effective amount of a dsRNA targeting TTR can reduce TTR serum levels by at least 25%. In another example, a therapeutically effective amount of a dsRNA targeting TTR can improve liver function or renal function by at least 25%.

[0085] The term “pharmaceutically acceptable carrier” refers to a carrier for administration of a therapeutic agent. Such carriers include, but are not limited to, saline, buffered saline, dextrose, water, glycerol, ethanol, and combinations thereof. The term specifically excludes cell culture medium. For drugs administered orally, pharmaceutically acceptable carriers include, but are not limited to pharmaceutically acceptable excipients such as inert diluents, disintegrating agents, binding agents, lubricating agents, sweetening agents, flavoring agents, coloring agents and preservatives. Suitable inert diluents include sodium and calcium carbonate, sodium and calcium phosphate, and lactose, while corn starch and alginic acid are suitable disintegrating agents. Binding agents may include starch and gelatin, while the lubricating agent, if present, will generally be magnesium stearate, stearic acid or talc. If desired, the tablets may be coated with a material such as glyceryl monostearate or glyceryl distearate, to delay absorption in the gastrointestinal tract.

[0086] As used herein, a “transformed cell” is a cell into which a vector has been introduced from which a dsRNA molecule may be expressed.

### II. Double-stranded ribonucleic acid (dsRNA)

[0087] As described in more detail herein, the invention provides double-stranded ribonucleic acid (dsRNA) molecules for inhibiting the expression of a TTR gene in a cell or mammal, e.g., in a human having a TTR amyloidosis, where the dsRNA includes an antisense strand having a region of complementarity which is complementary to at least a part of an mRNA formed in the expression of a TTR gene, and where the region of complementarity is less than 30 nucleotides in length, generally 19-24 nucleotides in length, and where said dsRNA, upon contact with a cell expressing said TTR gene, inhibits the expression of said TTR gene by at least 30% as assayed by, for example, a PCR or branched DNA (bDNA)-based method, or by a protein-based method, such as by Western blot. Expression of a TTR gene can be reduced by at least 30% when measured by an assay as described in the Examples below. For example, expression of a TTR gene in cell culture, such as in Hep3B cells, can be assayed by measuring TTR mRNA levels, such as by bDNA or TaqMan assay, or by measuring protein levels, such as by ELISA assay. The dsRNA of the invention can further include one or more single-stranded nucleotide overhangs.

[0088] The dsRNA can be synthesized by standard methods known in the art as further discussed below, e.g., by use of an automated DNA synthesizer, such as are commercially available from, for example, Biosearch, Applied Biosystems, Inc. The dsRNA includes two RNA strands that are sufficiently complementary to hybridize to form a duplex structure. One strand of the dsRNA (the antisense strand) includes a region of complementarity that is substantially complementary, and generally fully complementary, to a target sequence, derived from the sequence of an mRNA formed during the expression of a TTR gene, the other strand (the sense strand) includes a region that is complementary to the antisense strand, such that the two strands hybridize and form a duplex structure when combined under suitable conditions. Generally, the duplex structure is between 15 and 30 or between 25 and 30, or between 18 and 25, or between 19 and 24, or between 19 and 21, or 19, 20, or 21 base pairs in length. In one embodiment the duplex is 19 base pairs in length. In another embodiment the duplex is 21 base pairs in length. When two different siRNAs are used in combination, the duplex lengths can be identical or can differ.

[0089] Each strand of the dsRNA of invention is generally between 15 and 30, or between 18 and 25, or 18, 19, 20, 21, 22, 23, 24, or 25 nucleotides in length. In other embodiments, each is strand is 25-30 nucleotides in length. Each strand of the duplex can be the same length or of different lengths. When two different siRNAs are used in combination, the lengths of each strand of each siRNA can be identical or can differ.

[0090] The dsRNA of the invention can include one or more single-stranded overhang(s) of one or more nucleotides. In one embodiment, at least one end of the dsRNA has a single-stranded nucleotide overhang of 1 to 4, generally 1 or 2 nucleotides. In another embodiment, the antisense strand of the dsRNA has 1-10 nucleotides overhangs each at the 3′ end and the 5′ end over the sense strand. In further embodiments, the sense strand of the dsRNA has 1-10 nucleotides overhangs each at the 3′ end and the 5′ end over the antisense strand.

[0091] A dsRNAs having at least one nucleotide overhang can have unexpectedly superior inhibitory properties than the blunt-ended counterpart. In some embodiments the presence of only one nucleotide overhang strengthens the interference activity of the dsRNA, without affecting its overall stability. A dsRNA having only one overhang has proven particularly stable and effective in vivo, as well as in a variety of cells, cell culture mediums, blood, and serum. Generally, the single-stranded overhang is located at the 3′-terminal end of the antisense strand or, alternatively, at the 3′-terminal end of the sense strand. The dsRNA can also have a blunt end, generally located at the 5′-end of the antisense strand. Such dsRNAs can have improved stability and inhibitory activity, thus allowing administration at low dosages, i.e., less than 5 mg/kg body weight of the recipient per day. Generally, the antisense strand of the dsRNA has a nucleotide overhang at the 3′-end, and the 5′-end is blunt. In another embodiment, one or more of the nucleotides in the overhang is replaced with a nucleoside thiophosphate.

[0092] In one embodiment, a TTR gene is a human TTR gene. In specific embodiments, the sense strand of the dsRNA is one of the sense sequences from Tables 3A, 3B, 4, 6A, 6B, or 7, and the antisense strand is one of the antisense sequences of Tables 3A, 3B, 4, 6A, 6B, or 7. Alternative antisense agents that target elsewhere in the target sequence provided in Tables 3A, 3B, 4, 6A, 6B, or 7 can readily be determined using the target sequence and the flanking TTR sequence.

[0093] The skilled person is well aware that dsRNAs having a duplex structure of between 20 and 23, but specifically 21, base pairs have been hailed as particularly effective in inducing RNA interference (Elbashir et al., EMBO 2001, 20:6877-6888). However, others have found that shorter or longer dsRNAs can be effective as well. In the embodiments described above, by virtue of the nature of the oligonucleotide sequences provided in Tables 3A, 3B, 4, 6A, 6B, and 7, the dsRNAs featured in the invention can include at least one strand of a length described herein. It can be reasonably expected that shorter dsRNAs having one of the sequences of Tables 3A, 3B, 4, 6A, 6B, or 7 minus only a few nucleotides on one or both ends may be similarly effective as compared to the dsRNAs described above. Hence, dsRNAs having a partial sequence of at least 15, 16, 17, 18, 19, 20, or more contiguous nucleotides from one of the sequences of Tables 3, 4, 6 or 7, and differing in their ability to inhibit the expression of a TTR gene in an assay as described herein below by not more than 5, 10, 15, 20, 25, or 30% inhibition from a dsRNA comprising the full sequence, are contemplated by the invention. Further, dsRNAs that cleave within a desired TTR target sequence can readily be made using the corresponding TTR antisense sequence and a complementary sense sequence.

[0094] In addition, the dsRNAs provided in Tables 3A, 3B, 4, 6A, 6B, or 7 identify a site in a TTR that is susceptible to RNAi based cleavage. As such, the present invention further features dsRNAs that target within the sequence targeted by one of the agents of the present invention. As used herein, a second dsRNA is said to target within the sequence of a first dsRNA if the second dsRNA cleaves the message anywhere within the mRNA that is complementary to the antisense strand of the first dsRNA. Such a second dsRNA will generally consist of at least 15 contiguous nucleotides from one of the sequences provided in Tables 3A, 3B, 4, 6A, 6B, or 7 coupled to additional nucleotide sequences taken from the region contiguous to the selected sequence in a TTR gene.

[0095] Cleavage of the RNA target can be routinely detected by gel electrophoresis and, if necessary, associated nucleic acid hybridization techniques known in the art. The cleavage site on the target mRNA of a dsRNA can be determined using methods generally known to one of ordinary skill in the art, e.g., the 5′-RACE method described in Soutschek et al., Nature; 2004, Vol. 432, pp. 173-178 (which is herein incorporated by reference for all purposes). In an embodiment, using the 5′-RACE method described by Soutschek et al., ALN-18328 was determined to cleave a TTR mRNA between the guanine nucleotide at position 636 of SEQ ID NO:1331 (NM_000371.3) and the adenine nucleotide at position 637 of SEQ ID NO:1331. In an embodiment, it was determined that ALN-18328 does not cleave a TTR mRNA between the adenine nucleotide at position 637 of SEQ ID NO:1331 and the guanine nucleotide at position 638 of SEQ ID NO:1331.

[0096] The dsRNA featured in the invention can contain one or more mismatches to the target sequence. In one embodiment, the dsRNA featured in the invention contains no more than 3 mismatches. If the antisense strand of the dsRNA contains mismatches to a target sequence, it is preferable that the area of mismatch not be located in the center of the region of complementarity. If the antisense strand of the dsRNA contains mismatches to the target sequence, it is preferable that the mismatch be restricted to 5 nucleotides from either end, for example 5, 4, 3, 2, or 1 nucleotide from either the 5′ or 3′ end of the region of complementarity. For example, for a 23 nucleotide dsRNA strand which is complementary to a region of a TTR gene, the dsRNA generally does not contain any mismatch within the central 13 nucleotides. The methods described within the invention can be used to determine whether a dsRNA containing a mismatch to a target sequence is effective in inhibiting the expression of a TTR gene. Consideration of the efficacy of dsRNAs with mismatches in inhibiting expression of a TTR gene is important, especially if the particular region of complementarity in a TTR gene is known to have polymorphic sequence variation within the population.

[0097] Modifications

[0098] In yet another embodiment, the dsRNA is chemically modified to enhance stability. The nucleic acids featured in the invention may be synthesized and/or modified by methods well established in the art, such as those described in “Current protocols in nucleic acid chemistry,” Beaucage, S. L. et al. (Eds.), John Wiley & Sons, Inc., New York, NY, USA, which is hereby incorporated herein by reference. Specific examples of dsRNA compounds useful in this invention include dsRNAs containing modified backbones or no natural internucleoside linkages. As defined in this specification, dsRNAs having modified backbones include those that retain a phosphorus atom in the backbone and those that do not have a phosphorus atom in the backbone. For the purposes of this specification, and as sometimes referenced in the art, modified dsRNAs that do not have a phosphorus atom in their internucleoside backbone can also be considered to be oligonucleosides.

[0099] Modified dsRNA backbones include, for example, phosphorothioates, chiral phosphorothioates, phosphorodithioates, phosphotriesters, aminoalkylphosphotriesters, methyl and other alkyl phosphonates including 3′-alkylene phosphonates and chiral phosphonates, phosphinates, phosphoramidates including 3′-amino phosphoramidate and aminoalkylphosphoramidates, thionophosphoramidates, thionoalkylphosphonates, thionoalkylphosphotriesters, and boranophosphates having normal 3′-5′ linkages, 2′-5′ linked analogs of these, and those) having inverted polarity wherein the adjacent pairs of nucleoside units are linked 3′-5′ to 5′-3′ or 2′-5′ to 5′-2′. Various salts, mixed salts and free acid forms are also included.

[0100] Representative U.S. patents that teach the preparation of the above phosphorus-containing linkages include, but are not limited to, U.S. Pat. Nos. 3,687,808; 4,469,863; 4,476,301; 5,023,243; 5,177,195; 5,188,897; 5,264,423; 5,276,019; 5,278,302; 5,286,717; 5,321,131; 5,399,676; 5,405,939; 5,453,496; 5,455,233; 5,466,677; 5,476,925; 5,519,126; 5,536,821; 5,541,316; 5,550,111; 5,563,253; 5,571,799; 5,587,361; and 5,625,050, each of which is herein incorporated by reference

[0101] Modified dsRNA backbones that do not include a phosphorus atom therein have backbones that are formed by short chain alkyl or cycloalkyl internucleoside linkages, mixed heteroatoms and alkyl or cycloalkyl internucleoside linkages, or ore or more short chain heteroatomic or heterocyclic internucleoside linkages. These include those having morpholino linkages (formed in part from the sugar portion of a nucleoside); siloxane backbones; sulfide, sulfoxide and sulfone backbones; formacetyl and thioformacetyl backbones; methylene formacetyl and thioformacetyl backbones; alkene containing backbones; sulfamate backbones; methyleneimino and methylenehydrazino backbones; sulfonate and sulfonamide backbones; amide backbones; and others having mixed N, O, S and CH₂ component parts.

[0102] Representative U.S. patents that teach the preparation of the above oligonucleosides include, but are not limited to, U.S. Pat. Nos. 5,034,506; 5,166,315; 5,185,444; 5,214,134; 5,216,141; 5,235,033; 5,64,562; 5,264,564; 5,405,938; 5,434,257; 5,466,677; 5,470,967; 5,489,677; 5,541,307; 5,561,225; 5,596,086; 5,602,240; 5,608,046; 5,610,289; 5,618,704; 5,623,070; 5,663,312; 5,633,360; 5,677,437; and, 5,677,439, each of which is herein incorporated by reference.

[0103] In other suitable dsRNA mimetics, both the sugar and the internucleoside linkage, i.e., the backbone, of the nucleotide units are replaced with novel groups. The base units are maintained for hybridization with an appropriate nucleic acid target compound. One such oligomeric compound, a dsRNA mimetic that has been shown to have excellent hybridization properties, is referred to as a peptide nucleic acid (PNA). In PNA compounds, the sugar backbone of a dsRNA is replaced with an amide containing backbone, in particular an aminoethylglycine backbone. The nucleobases are retained and are bound directly or indirectly to aza nitrogen atoms of the amide portion of the backbone. Representative U.S. patents that teach the preparation of PNA compounds include, but are not limited to, U.S. Pat. Nos. 5,539,082; 5,714,331; and 5,719,262, each of which is herein incorporated by reference. Further teaching of PNA compounds can be found in Nielsen et al., Science, 1991, 254, 1497-1500.

[0104] Other embodiments of the invention are dsRNAs with phosphorothioate backbones and oligonucleosides with heteroatom backbones, and in particular —CH₂—NH—CH₂—, —CH₂—N(CH₃)—O—CH₂— [known as a methylene (methylimino) or MMI backbone], —CH₂—O—N(CH₃)—CH₂—, —CH₂—N(CH₃)—N(CH₃)—CH₂— and —N(CH₃)—CH₂—CH₂— [wherein the native phosphodiester backbone is represented as —O—P—O—CH₂—] of the above-referenced U.S. Pat. No. 5,489,677, and the amide backbones of the above-referenced U.S. Pat. No. 5,602,240. Also preferred are dsRNAs having morpholino backbone structures of the above-referenced U.S. Pat. No. 5,034,506.

[0105] Modified dsRNAs may also contain one or more substituted sugar moieties. Preferred dsRNAs comprise one of the following at the 2′ position: OH; F; O-, S-, or N-alkyl; O-, S-, or N-alkenyl; O—, S- or N-alkynyl; or O-alkyl-O-alkyl, wherein the alkyl, alkenyl and alkynyl may be substituted or unsubstituted C₁ to C₁₀ alkyl or C₂ to C₁₀ alkenyl and alkynyl. Particularly preferred are O[(CH₂)ₙO]ₘCH₃, O(CH₂)ₙOCH₃, O(CH₂)ₙNH₂, O(CH₂)ₙCH₃, O(CH₂)ₙONH₂, and O(CH₂)ₙON[(CH₂)ₙCH₃)]₂, where n and m are from 1 to about 10. Other preferred dsRNAs comprise one of the following at the 2′ position: C₁ to C₁₀ lower alkyl, substituted lower alkyl, alkaryl, aralkyl, O-alkaryl or O-aralkyl, SH, SCH₃, OCN, Cl, Br, CN, CF₃, OCF₃, SOCH₃, SO₂CH₃, ONO₂, NO₂, N₃, NH₂, heterocycloalkyl, heterocycloalkaryl, aminoalkylamino, polyalkylamino, substituted silyl, an RNA cleaving group, a reporter group, an intercalator, a group for improving the pharmacokinetic properties of an dsRNA, or a group for improving the pharmacodynamic properties of an dsRNA, and other substituents having similar properties. A preferred modification includes 2′-methoxyethoxy (2′-O—CH₂CH₂OCH₃, also known as 2′-O-(2-methoxyethyl) or 2′-MOE) (Martin et al., Helv. Chim. Acta, 1995, 78, 486-504) i.e., an alkoxy-alkoxy group. A further preferred modification includes 2′-dimethylaminooxyethoxy, i.e., a O(CH₂)₂ON(CH₃)₂ group, also known as 2′-DMAOE, as described in examples herein below, and 2′-dimethylaminoethoxyethoxy (also known in the art as 2′-O-dimethylaminoethoxyethyl or 2′-DMAEOE), i.e., 2′-O—CH₂—O—CH₂—N(CH₂)₂, also described in examples herein below.

[0106] Other preferred modifications include 2′-methoxy (2′-OCH₃), 2′-aminopropoxy (2′-OCH₂CH₂CH₂NH₂) and 2′-fluoro (2′-F). Similar modifications may also be made at other positions on the dsRNA, particularly the 3′ position of the sugar on the 3′ terminal nucleotide or in 2′-5′ linked dsRNAs and the 5′ position of 5′ terminal nucleotide. DsRNAs may also have sugar mimetics such as cyclobutyl moieties in place of the pentofuranosyl sugar. Representative U.S. patents that teach the preparation of such modified sugar structures include, but are not limited to, U.S. Pat. Nos. 4,981,957; 5,118,800; 5,319,080; 5,359,044; 5,393,878; 5,446,137; 5,466,786; 5,514,785; 5,519,134; 5,567,811; 5,576,427; 5,591,722; 5,597,909; 5,610,300; 5,627,053; 5,639,873; 5,646,265; 5,658,873; 5,670,633; and 5,700,920, certain of which are commonly owned with the instant application, and each of which is herein incorporated by reference in its entirety.

[0107] dsRNAs may also include nucleobase (often referred to in the art simply as “base”) modifications or substitutions. As used herein, “unmodified” or “natural” nucleobases include the purine bases adenine (A) and guanine (G), and the pyrimidine bases thymine (T), cytosine (C) and uracil (U). Modified nucleobases include other synthetic and natural nucleobases such as 5-methylcytosine (5-me-C), 5-hydroxymethyl cytosine, xanthine, hypoxanthine, 2-aminoadenine, 6-methyl and other alkyl derivatives of adenine and guanine, 2-propyl and other alkyl derivatives of adenine and guanine, 2-thiouracil, 2-thiothymine and 2-thiocytosine, 5-halouracil and cytosine, 5-propynyl uracil and cytosine, 6-azo uracil, cytosine and thymine, 5-uracil (pseudouracil), 4-thiouracil, 8-halo, 8-amino, 8-thiol, 8-thioalkyl, 8-hydroxyl anal other 8-substituted adenines and guanines, 5-halo, particularly 5-bromo, 5-trifluoromethyl and other 5-substituted uracils and cytosines, 7-methylguanine and 7-methyladenine, 8-azaguanine and 8-azaadenine, 7-deazaguanine and 7-daazaadenine and 3-deazaguanine and 3-deazaadenine. Further nucleobases include those disclosed in U.S. Pat. No. 3,687,808, those disclosed in The Concise Encyclopedia Of Polymer Science And Engineering, pages 858-859, Kroschwitz, J. L, ed. John Wiley & Sons, 1990, these disclosed by Englisch et al., Angewandte Chemie, International Edition, 1991, 30, 613, and those disclosed by Sanghvi, Y S., Chapter 15, DsRNA Research and Applications, pages 289-302, Crooke, S. T. and Lebleu, B., Ed., CRC Press, 1993. Certain of these nucleobases are particularly useful for increasing the binding affinity of the oligomeric compounds featured in the invention. These include 5-substituted pyrimidines, 6-azapyrimidines and N-2, N-6 and 0-6 substituted purines, including 2-aminopropyladenine, 5-propynyluracil and 5-propynylcytosine. 5-methylcytosine substitutions have been shown to increase nucleic acid duplex stability by 0.6-1.2° C. (Sanghvi, Y. S., Crooke, S. T. and Lebleu, B., Eds., DsRNA Research and Applications, CRC Press, Boca Raton, 1993, pp. 276-278) and are exemplary base substitutions, even more particularly when combined with 2′-O-methoxyethyl sugar modifications.

[0108] Representative U.S. patents that teach the preparation of certain of the above noted modified nucleobases as well as other modified nucleobases include, but are not limited to, the above noted U.S. Pat. No. 3,687,808, as well as U.S. Pat. Nos. 4,845,205; 5,130,30; 5,134,066; 5,175,273; 5,367,066; 5,432,272; 5,457,187; 5,459,255; 5,484,908; 5,502,177; 5,525,711; 5,552,540; 5,587,469; 5,594,121, 5,596,091; 5,614,617; and 5,681,941, each of which is herein incorporated by reference, and U.S. Pat. No. 5,750,692, also herein incorporated by reference.

[0109] Conjugates

[0110] Another modification of the dsRNAs of the invention involves chemically linking to the dsRNA one or more moieties or conjugates which enhance the activity, cellular distribution or cellular uptake of the dsRNA. Such moieties include but are not limited to lipid moieties such as a cholesterol moiety (Letsinger et al., Proc. Natl. Acid. Sci. USA, 1989, 86: 6553-6556), cholic acid (Manoharan et al., Biorg. Med. Chem. Let., 1994, 4:1053-1060), a thioether, e.g., beryl-S-tritylthiol (Manoharan et al., Ann. N.Y. Acad. Sci., 1992, 660:306-309; Manoharan et al., Biorg. Med. Chem. Let., 1993, 3:2765-2770), a thiocholesterol (Oberhauser et al., Nucl. Acids Res., 1992, 20:533-538), an aliphatic chain, e.g., dodecandiol or undecyl residues (Saison-Behmoaras et al., EMBO J, 1991, 10:1111-1118; Kabanov et al., FEBS Lett., 1990, 259:327-330; Svinarchuk et al., Biochimie, 1993, 75:49-54), a phospholipid, e.g., di-hexadecyl-rac-glycerol or triethyl-ammonium 1,2-di-O-hexadecyl-rac-glycero-3-Hphosphonate (Manoharan et al., Tetrahedron Lett., 1995, 36:3651-3654; Shea et al., Nucl. Acids Res., 1990, 18:3777-3783), a polyamine or a polyethylene glycol chain (Manoharan et al., Nucleosides & Nucleotides, 1995, 14:969-973), or adamantane acetic acid (Manoharan et al., Tetrahedron Lett., 1995, 36:3651-3654), a palmityl moiety (Mishra et al., Biochim. Biophys. Acta, 1995, 1264:229-237), or an octadecylamine or hexylamino-carbonyloxycholesterol moiety (Crooke et al., J. Pharmacol. Exp. Ther., 1996, 277:923-937).

[0111] Representative U.S. patents that teach the preparation of such dsRNA conjugates include, but are not limited to, U.S. Pat. Nos. 4,828,979; 4,948,882; 5,218,105; 5,525,465; 5,541,313; 5,545,730; 5,552,538; 5,578,717, 5,580,731; 5,591,584; 5,109,124; 5,118,802; 5,138,045; 5,414,077; 5,486,603; 5,512,439; 5,578,718; 5,608,046; 4,587,044; 4,605,735; 4,667,025; 4,762,779; 4,789,737; 4,824,941; 4,835,263; 4,876,335; 4,904,582; 4,958,013; 5,082,830; 5,112,963; 5,214,136; 5,082,830; 5,112,963; 5,214,136; 5,245,022; 5,254,469; 5,258,506; 5,262,536; 5,272,250; 5,292,873; 5,317,098; 5,371,241, 5,391,723; 5,416,203, 5,451,463; 5,510,475; 5,512,667; 5,514,785; 5,565,552; 5,567,810; 5,574,142; 5,585,481; 5,587,371; 5,595,726; 5,597,696; 5,599,923; 5,599,928 and 5,688,941, each of which is herein incorporated by reference.

[0112] It is not necessary for all positions in a given compound to be uniformly modified, and in fact more than one of the aforementioned modifications may be incorporated in a single compound or even at a single nucleoside within a dsRNA. The present invention also includes dsRNA compounds which are chimeric compounds. “Chimeric” dsRNA compounds or “chimeras,” in the context of this invention, are dsRNA compounds, particularly dsRNAs, which contain two or more chemically distinct regions, each made up of at least one monomer unit, i.e., a nucleotide in the case of a dsRNA compound. These dsRNAs typically contain at least one region wherein the dsRNA is modified so as to confer upon the dsRNA increased resistance to nuclease degradation, increased cellular uptake, and/or increased binding affinity for the target nucleic acid. An additional region of the dsRNA may serve as a substrate for enzymes capable of cleaving RNA:DNA or RNA:RNA hybrids. By way of example, RNase H is a cellular endonuclease which cleaves the RNA strand of an RNA:DNA duplex. Activation of RNase H, therefore, results in cleavage of the RNA target, thereby greatly enhancing the efficiency of dsRNA inhibition of gene expression. Consequently, comparable results can often be obtained with shorter dsRNAs when chimeric dsRNAs are used, compared to phosphorothioate deoxydsRNAs hybridizing to the same target region.

[0113] In certain instances, the dsRNA may be modified by a non-ligand group. A number of non-ligand molecules have been conjugated to dsRNAs in order to enhance the activity, cellular distribution or cellular uptake of the dsRNA, and procedures for performing such conjugations are available in the scientific literature. Such non-ligand moieties have included lipid moieties, such as cholesterol (Letsinger et al., Proc. Natl. Acad. Sci. USA, 1989, 86:6553), cholic acid (Manoharan et al., Bioorg. Med. Chem. Lett., 1994, 4:1053), a thioether, e.g., hexyl-S-tritylthiol (Manoharan et al., Ann. N.Y. Acad. Sci., 1992, 660:306; Manoharan et al., Bioorg. Med. Chem. Let., 1993, 3:2765), a thiocholesterol (Oberhauser et al., Nucl. Acids Res., 1992, 20:533), an aliphatic chain, e.g., dodecandiol or undecyl residues (Saison-Behmoaras et al., EMBO J., 1991, 10:111; Kabanov et al., FEBS Lett., 1990, 259:327; Svinarchuk et al., Biochimie, 1993, 75:49), a phospholipid, e.g., di-hexadecyl-rac-glycerol or triethylammonium 1,2-di-O-hexadecyl-rac-glycero-3-H-phosphonate (Manoharan et al., Tetrahedron Lett., 1995, 36:3651; Shea et al., Nucl. Acids Res., 1990, 18:3777), a polyamine or a polyethylene glycol chain (Manoharan et al., Nucleosides & Nucleotides, 1995, 14:969), or adamantane acetic acid (Manoharan et al., Tetrahedron Lett., 1995, 36:3651), a palmityl moiety (Mishra et al., Biochim. Biophys. Acta, 1995, 1264:229), or an octadecylamine or hexylamino-carbonyl-oxycholesterol moiety (Crooke et al., J. Pharmacol. Exp. Ther., 1996, 277:923). Representative United States patents that teach the preparation of such dsRNA conjugates have been listed above. Typical conjugation protocols involve the synthesis of dsRNAs bearing an aminolinker at one or more positions of the sequence. The amino group is then reacted with the molecule being conjugated using appropriate coupling or activating reagents. The conjugation reaction may be performed either with the dsRNA still bound to the solid support or following cleavage of the dsRNA in solution phase. Purification of the dsRNA conjugate by HPLC typically affords the pure conjugate.

[0114] Vector Encoded dsRNAs

[0115] In another aspect, TTR dsRNA molecules are expressed from transcription units inserted into DNA or RNA vectors (see, e.g., Couture, A, et al., TIG. (1996), 12:5-10; Skillern, A., et al., International PCT Publication No. WO 00/22113, Conrad, International PCT Publication No. WO 00/22114, and Conrad, U.S. Pat. No. 6,054,299). These transgenes can be introduced as a linear construct, a circular plasmid, or a viral vector, which can be incorporated and inherited as a transgene integrated into the host genome. The transgene can also be constructed to permit it to be inherited as an extrachromosomal plasmid (Gassmann, et al., Proc. Natl. Acad. Sci. USA (1995) 92:1292).

[0116] The individual strands of a dsRNA can be transcribed by promoters on two separate expression vectors and co-transfected into a target cell. Alternatively each individual strand of the dsRNA can be transcribed by promoters both of which are located on the same expression plasmid. In one embodiment, a dsRNA is expressed as an inverted repeat joined by a linker polynucleotide sequence such that the dsRNA has a stem and loop structure.

[0117] The recombinant dsRNA expression vectors are generally DNA plasmids or viral vectors. dsRNA expressing viral vectors can be constructed based on, but not limited to, adeno-associated virus (for a review, see Muzyczka, et al., Curr. Topics Micro. Immunol. (1992) 158:97-129)); adenovirus (see, for example, Berkner, et al., BioTechniques (1998) 6:616), Rosenfeld et al. (1991, Science 252:431-434), and Rosenfeld et al. (1992), Cell 68:143-155)); or alphavirus as well as others known in the art. Retroviruses have been used to introduce a variety of genes into many different cell types, including epithelial cells, in vitro and/or in vivo (see, e.g., Eglitis, et al., Science (1985) 230:1395-1398; Danos and Mulligan, Proc. NatI. Acad. Sci. USA (1998) 85:6460-6464; Wilson et al., 1988, Proc. NatI. Acad. Sci. USA 85:3014-3018; Armentano et al., 1990, Proc. NatI. Acad. Sci. USA 87:61416145; Huber et al., 1991, Proc. NatI. Acad. Sci. USA 88:8039-8043; Ferry et al., 1991, Proc. NatI. Acad. Sci. USA 88:8377-8381; Chowdhury et al., 1991, Science 254:1802-1805; van Beusechem. et al., 1992, Proc. Natl. Acad. Sci. USA 89:7640-19; Kay et al., 1992, Human Gene Therapy 3:641-647; Dai et al., 1992, Proc. Natl. Acad. Sci. USA 89:10892-10895; Hwu et al., 1993, J. Immunol. 150:4104-4115; U.S. Pat. Nos. 4,868,116; 4,980,286; PCT Application WO 89/07136; PCT Application WO 89/02468; PCT Application WO 89/05345; and PCT Application WO 92/07573). Recombinant retroviral vectors capable of transducing and expressing genes inserted into the genome of a cell can be produced by transfecting the recombinant retroviral genome into suitable packaging cell lines such as PA317 and Psi-CRIP (Comette et al., 1991, Human Gene Therapy 2:5-10; Cone et al., 1984, Proc. Natl. Acad. Sci. USA 81:6349). Recombinant adenoviral vectors can be used to infect a wide variety of cells and tissues in susceptible hosts (e.g., rat, hamster, dog, and chimpanzee) (Hsu et al., 1992, J. Infectious Disease, 166:769), and also have the advantage of not requiring mitotically active cells for infection.

[0118] Any viral vector capable of accepting the coding sequences for the dsRNA molecule(s) to be expressed can be used, for example vectors derived from adenovirus (AV); adeno-associated virus (AAV); retroviruses (e.g, lentiviruses (LV), Rhabdoviruses, murine leukemia virus); herpes virus, and the like. The tropism of viral vectors can be modified by pseudotyping the vectors with envelope proteins or other surface antigens from other viruses, or by substituting different viral capsid proteins, as appropriate.

[0119] For example, lentiviral vectors featured in the invention can be pseudotyped with surface proteins from vesicular stomatitis virus (VSV), rabies, Ebola, Mokola, and the like. AAV vectors featured in the invention can be made to target different cells by engineering the vectors to express different capsid protein serotypes. For example, an AAV vector expressing a serotype 2 capsid on a serotype 2 genome is called AAV 2/2. This serotype 2 capsid gene in the AAV 2/2 vector can be replaced by a serotype 5 capsid gene to produce an AAV 2/5 vector. Techniques for constructing AAV vectors which express different capsid protein serotypes are within the skill in the art; see, e.g., Rabinowitz J E et al. (2002), J Virol 76:791-801, the entire disclosure of which is herein incorporated by reference.

[0120] Selection of recombinant viral vectors suitable for use in the invention, methods for inserting nucleic acid sequences for expressing the dsRNA into the vector, and methods of delivering the viral vector to the cells of interest are within the skill in the art. See, for example, Dornburg R (1995), Gene Therap. 2: 301-310; Eglitis M A (1988), Biotechniques 6: 608-614; Miller A D (1990), Hum Gene Therap. 1: 5-14; Anderson W F (1998), Nature 392: 25-30; and Rubinson D A et al., Nat. Genet. 33: 401-406, the entire disclosures of which are herein incorporated by reference.

[0121] Viral vectors can be derived from AV and AAV. In one embodiment, the dsRNA featured in the invention is expressed as two separate, complementary single-stranded RNA molecules from a recombinant AAV vector having, for example, either the U6 or H1 RNA promoters, or the cytomegalovirus (CMV) promoter.

[0122] A suitable AV vector for expressing the dsRNA featured in the invention, a method for constructing the recombinant AV vector, and a method for delivering the vector into target cells, are described in Xia H et al. (2002), Nat. Biotech. 20: 1006-1010.

[0123] Suitable AAV vectors for expressing the dsRNA featured in the invention, methods for constructing the recombinant AV vector, and methods for delivering the vectors into target cells are described in Samulski R et al. (1987), J. Virol. 61: 3096-3101; Fisher K J et al. (1996), J. Virol, 70: 520-532; Samulski R et al. (1989), J. Virol. 63: 3822-3826; U.S. Pat. Nos. 5,252,479; 5,139,941; International Patent Application No. WO 94/13788; and International Patent Application No. WO 93/24641, the entire disclosures of which are herein incorporated by reference.

[0124] The promoter driving dsRNA expression in either a DNA plasmid or viral vector featured in the invention may be a eukaryotic RNA polymerase I (e.g., ribosomal RNA promoter), RNA polymerase II (e.g., CMV early promoter or actin promoter or U1 snRNA promoter) or generally RNA polymerase III promoter (e.g., U6 snRNA or 7SK RNA promoter) or a prokaryotic promoter, for example the T7 promoter, provided the expression plasmid also encodes T7 RNA polymerase required for transcription from a T7 promoter. The promoter can also direct transgene expression to the pancreas (see, e.g., the insulin regulatory sequence for pancreas (Bucchini et al., 1986, Proc. Natl. Acad. Sci. USA 83:2511-2515)).

[0125] In addition, expression of the transgene can be precisely regulated, for example, by using an inducible regulatory sequence and expression systems such as a regulatory sequence that is sensitive to certain physiological regulators, e.g., circulating glucose levels, or hormones (Docherty et al., 1994, FASEB J. 8:20-24). Such inducible expression systems, suitable for the control of transgene expression in cells or in mammals include regulation by ecdysone, by estrogen, progesterone, tetracycline, chemical inducers of dimerization, and isopropyl-beta-D1-thiogalactopyranoside (EPTG). A person skilled in the art would be able to choose the appropriate regulatory/promoter sequence based on the intended use of the dsRNA transgene.

[0126] Generally, recombinant vectors capable of expressing dsRNA molecules are delivered as described below, and persist in target cells. Alternatively, viral vectors can be used that provide for transient expression of dsRNA molecules. Such vectors can be repeatedly administered as necessary. Once expressed, the dsRNAs bind to target RNA and modulate its function or expression. Delivery of dsRNA expressing vectors can be systemic, such as by intravenous or intramuscular administration, by administration to target cells ex-planted from the patient followed by reintroduction into the patient, or by any other means that allows for introduction into a desired target cell.

[0127] dsRNA expression DNA plasmids are typically transfected into target cells as a complex with cationic lipid carriers (e.g., Oligofectamine) or non-cationic lipid-based carriers (e.g., Transit-TKO™). Multiple lipid transfections for dsRNA-mediated knockdowns targeting different regions of a single TTR gene or multiple TTR genes over a period of a week or more are also contemplated by the invention. Successful introduction of vectors into host cells can be monitored using various known methods. For example, transient transfection can be signaled with a reporter, such as a fluorescent marker, such as Green Fluorescent Protein (GFP). Stable transfection of cells ex vivo can be ensured using markers that provide the transfected cell with resistance to specific environmental factors (e.g., antibiotics and drugs), such as hygromycin B resistance.

[0128] TTR specific dsRNA molecules can also be inserted into vectors and used as gene therapy vectors for human patients. Gene therapy vectors can be delivered to a subject by, for example, intravenous injection, local administration (see U.S. Pat. No. 5,328,470) or by stereotactic injection (see e.g., Chen et al. (1994) Proc. Natl. Acad. Sci. USA 91:3054-3057). The pharmaceutical preparation of the gene therapy vector can include the gene therapy vector in an acceptable diluent, or can include a slow release matrix in which the gene delivery vehicle is imbedded. Alternatively, where the complete gene delivery vector can be produced intact from recombinant cells, e.g., retroviral vectors, the pharmaceutical preparation can include one or more cells which produce the gene delivery system.

### III. Pharmaceutical Compositions Containing dsRNA

[0129] In one embodiment, the invention provides pharmaceutical compositions containing a dsRNA, as described herein, and a pharmaceutically acceptable carrier. The pharmaceutical composition containing the dsRNA is useful for treating a disease or disorder associated with the expression or activity of a TTR gene, such as pathological processes mediated by TTR expression. Such pharmaceutical compositions are formulated based on the mode of delivery. One example is compositions formulated for direct delivery to the eye. Another example is compositions that are formulated for systemic administration via parenteral delivery, e.g., by intravenous (IV) delivery. Another example is compositions that are formulated for direct delivery into the brain parenchyma, e.g., by infusion into the brain, such as by continuous pump infusion.

[0130] The pharmaceutical compositions featured herein are administered in dosages sufficient to inhibit expression of TTR genes.

[0131] In general, a suitable dose of dsRNA will be in the range of 0.00001 to 200.0 milligrams per kilogram body weight of the recipient per day, generally in the range of 1 to 50 mg per kilogram body weight per day.

[0132] In some embodiments, the dosage does not scale with body weight when the siRNA is administered to the eye.

[0133] The dosage can be, e.g., 25 μg for a 75 kg person, e.g. 0.3 μg/kg. Other dosages include, 0.01, 0.03, 0.05, 0.07, 0.1, 0.3, 0.5, 0.7, 1.0, 3.0. 5.0, 7.0, 10.0, 30.0, 50.0, 70.0, or 100.0 μg/kg.

[0134] For example, the dsRNA can be administered at 0.0059 mg/kg, 0.01 mg/kg, 0.0295 mg/kg, 0.05 mg/kg, 0.0590 mg/kg, 0.163 mg/kg, 0.2 mg/kg, 0.3 mg/kg, 0.4 mg/kg, 0.5 mg/kg, 0.543 mg/kg, 0.5900 mg/kg, 0.6 mg/kg, 0.7 mg/kg, 0.8 mg/kg, 0.9 mg/kg, 1 mg/kg, 1.1 mg/kg, 1.2 mg/kg, 1.3 mg/kg, 1.4 mg/kg, 1.5 mg/kg, 1.628 mg/kg, 2 mg/kg, 3 mg/kg, 5.0 mg/kg, 10 mg/kg, 20 mg/kg, 30 mg/kg, 40 mg/kg, or 50 mg/kg per single dose.

[0135] In one embodiment, the dosage is between 0.01 and 0.2 mg/kg. For example, the dsRNA can be administered at a dose of 0.01 mg/kg, 0.02 mg/kg, 0.03 mg/kg, 0.04 mg/kg, 0.05 mg/kg, 0.06 mg/kg, 0.07 mg/kg 0.08 mg/kg 0.09 mg/kg, 0.10 mg/kg, 0.11 mg/kg, 0.12 mg/kg, 0.13 mg/kg, 0.14 mg/kg, 0.15 mg/kg, 0.16 mg/kg, 0.17 mg/kg, 0.18 mg/kg, 0.19 mg/kg, or 0.20 mg/kg.

[0136] In one embodiment, the dosage is between 0.005 mg/kg and 1.628 mg/kg. For example, the dsRNA can be administered at a dose of 0.0059 mg/kg, 0.0295 mg/kg, 0.0590 mg/kg, 0.163 mg/kg, 0.543 mg/kg, 0.5900 mg/kg, or 1.628 mg/kg.

[0137] In one embodiment, the dosage is between 0.2 mg/kg and 1.5 mg/kg. For example, the dsRNA can be administered at a dose of 0.2 mg/kg, 0.3 mg/kg, 0.4 mg/kg, 0.5 mg/kg, 0.6 mg/kg, 0.7 mg/kg, 0.8 mg/kg, 0.9 mg/kg, 1 mg/kg, 1.1 mg/kg, 1.2 mg/kg, 1.3 mg/kg, 1.4 mg/kg, or 1.5 mg/kg.

[0138] The dsRNA can be administered at a dose of 0.03 mg/kg, or 0.03, 0.1, 0.2, or 0.4 mg/kg.

[0139] The pharmaceutical composition may be administered once daily, or the dsRNA may be administered as two, three, or more sub-doses at appropriate intervals throughout the day or even using continuous infusion or delivery through a controlled release formulation. In that case, the dsRNA contained in each sub-dose must be correspondingly smaller in order to achieve the total daily dosage. The dosage unit can also be compounded for delivery over several days, e.g., using a conventional sustained release formulation which provides sustained release of the dsRNA over a several day period. Sustained release formulations are well known in the art and are particularly useful for delivery of agents at a particular site, such as could be used with the agents of the present invention. In this embodiment, the dosage unit contains a corresponding multiple of the daily dose.

[0140] The effect of a single dose on TTR levels is long lasting, such that subsequent doses are administered at not more than 3, 4, or 5 day intervals, or at not more than 1, 2, 3, or 4 week intervals, or at not more than 5, 6, 7, 8, 9, or 10 week intervals.

[0141] The skilled artisan will appreciate that certain factors may influence the dosage and timing required to effectively treat a subject, including but not limited to the severity of the disease or disorder, previous treatments, the general health and/or age of the subject, and other diseases present. Moreover, treatment of a subject with a therapeutically effective amount of a composition can include a single treatment or a series of treatments. Estimates of effective dosages and in vivo half-lives for the individual dsRNAs encompassed by the invention can be made using conventional methodologies or on the basis of in vivo testing using an appropriate animal model, as described elsewhere herein.

[0142] Advances in mouse genetics have generated a number of mouse models for the study of various human diseases, such as pathological processes mediated by TTR expression. Such models are used for in vivo testing of dsRNA, as well as for determining a therapeutically effective dose. A suitable mouse model is, for example, a mouse containing a plasmid expressing human TTR. Another suitable mouse model is a transgenic mouse carrying a transgene that expresses human TTR.

[0143] The data obtained from cell culture assays and animal studies can be used in formulating a range of dosage for use in humans. The dosage of compositions featured in the invention lies generally within a range of circulating concentrations that include the ED50 with little or no toxicity. The dosage may vary within this range depending upon the dosage form employed and the route of administration utilized. For any compound used in the methods featured in the invention, the therapeutically effective dose can be estimated initially from cell culture assays. A dose may be formulated in animal models to achieve a circulating plasma concentration range of the compound or, when appropriate, of the polypeptide product of a target sequence (e.g., achieving a decreased concentration of the polypeptide) that includes the IC50 (i.e., the concentration of the test compound which achieves a half-maximal inhibition of symptoms) as determined in cell culture. Such information can be used to more accurately determine useful doses in humans. Levels in plasma may be measured, for example, by high performance liquid chromatography.

[0144] The dsRNAs featured in the invention can be administered in combination with other known agents effective in treatment of pathological processes mediated by target gene expression. In any event, the administering physician can adjust the amount and timing of dsRNA administration on the basis of results observed using standard measures of efficacy known in the art or described herein.

[0145] Administration

[0146] The present invention also includes pharmaceutical compositions and formulations which include the dsRNA compounds featured in the invention. The pharmaceutical compositions of the present invention may be administered in a number of ways depending upon whether local or systemic treatment is desired and upon the area to be treated. Administration may be topical, pulmonary, e.g., by inhalation or insufflation of powders or aerosols, including by nebulizer; intratracheal, intranasal, epidermal and transdermal, oral or parenteral. Parenteral administration includes intravenous, intraarterial, subcutaneous, intraperitoneal or intramuscular injection or infusion; or intracranial, e.g., intraparenchymal, intrathecal or intraventricular, administration.

[0147] The dsRNA can be delivered in a manner to target a particular tissue, such as the liver (e.g., the hepatocytes of the liver).

[0148] The dsRNA can be delivered in a manner to target a particular tissue, such as the eye. Modes of ocular delivery include retrobulbar, subcutaneous eyelid, subconjunctival, subtenon, anterior chamber or intravitreous injection (or internal injection or infusion).

[0149] The present invention includes pharmaceutical compositions that can be delivered by injection directly into the brain. The injection can be by stereotactic injection into a particular region of the brain (e.g., the substantia nigra, cortex, hippocampus, striatum, or globus pallidus), or the dsRNA can be delivered into multiple regions of the central nervous system (e.g., into multiple regions of the brain, and/or into the spinal cord). The dsRNA can also be delivered into diffuse regions of the brain (e.g., diffuse delivery to the cortex of the brain).

[0150] In one embodiment, a dsRNA targeting TTR can be delivered by way of a cannula or other delivery device having one end implanted in a tissue, e.g., the brain, e.g., the substantia nigra, cortex, hippocampus, striatum, corpus callosum or globus pallidus of the brain. The cannula can be connected to a reservoir of the dsRNA composition. The flow or delivery can be mediated by a pump, e.g., an osmotic pump or minipump, such as an Alzet pump (Durect, Cupertino, CA). In one embodiment, a pump and reservoir are implanted in an area distant from the tissue, e.g., in the abdomen, and delivery is effected by a conduit leading from the pump or reservoir to the site of release. Infusion of the dsRNA composition into the brain can be over several hours or for several days, e.g., for 1, 2, 3, 5, or 7 days or more. Devices for delivery to the brain are described, for example, in U.S. Pat. Nos. 6,093,180, and 5,814,014.

[0151] Pharmaceutical compositions and formulations for topical administration may include transdermal patches, ointments, lotions, creams, gels, drops, suppositories, sprays, liquids and powders. Conventional pharmaceutical carriers, aqueous, powder or oily bases, thickeners and the like may be necessary or desirable. Coated condoms, gloves and the like may also be useful. Suitable topical formulations include those in which the dsRNAs featured in the invention are in admixture with a topical delivery agent such as lipids, liposomes, fatty acids, fatty acid esters, steroids, chelating agents and surfactants. Suitable lipids and liposomes include neutral (e.g., dioleoylphosphatidyl DOPE ethanolamine, dimyristoylphosphatidyl choline DMPC, distearoylphosphatidyl choline) negative (e.g., dimyristoylphosphatidyl glycerol DMPG) and cationic (e.g., dioleoyltetramethylaminopropyl DOTAP and dioleoylphosphatidyl ethanolamine DOTMA). DsRNAs featured in the invention may be encapsulated within liposomes or may form complexes thereto, in particular to cationic liposomes. Alternatively, dsRNAs may be complexed to lipids, in particular to cationic lipids. Suitable fatty acids and esters include but are not limited to arachidonic acid, oleic acid, eicosanoic acid, lauric acid, caprylic acid, capric acid, myristic acid, palmitic acid, stearic acid, linoleic acid, linolenic acid, dicaprate, tricaprate, monoolein, dilaurin, glyceryl 1-monocaprate, 1-dodecylazacycloheptan-2-one, an acylcarnitine, an acylcholine, or a C₁₋₁₀ alkyl ester (e.g., isopropylmyristate IPM), monoglyceride, diglyceride or pharmaceutically acceptable salt thereof. Topical formulations are described in detail in U.S. Pat. No. 6,747,014, which is incorporated herein by reference.

[0152] Cholesterol Conjugation

[0153] An siRNA can be conjugated to a ligand such as cholesterol and vitamin E as described herein. It is understood that other conjugates can be linked to the oligonucleotides via a similar method known to one of ordinary skill in the art, such methods can be found in US publication nos. 2005/0107325, 2005/0164235, 2005/0256069 and 2008/0108801, which are hereby incorporated by their entirety.

[0154] Liposomal Formulations

[0155] There are many organized surfactant structures besides microemulsions that have been studied and used for the formulation of drugs. These include monolayers, micelles, bilayers and vesicles. Vesicles, such as liposomes, have attracted great interest because of their specificity and the duration of action they offer from the standpoint of drug delivery. As used in the present invention, the term “liposome” means a vesicle composed of amphiphilic lipids arranged in a spherical bilayer or bilayers.

[0156] Liposomes are unilamellar or multilamellar vesicles which have a membrane formed from a lipophilic material and an aqueous interior. The aqueous portion contains the composition to be delivered. Cationic liposomes possess the advantage of being able to fuse to the cell wall. Non-cationic liposomes, although not able to fuse as efficiently with the cell wall, are taken up by macrophages in vivo.

[0157] In order to cross intact mammalian skin, lipid vesicles must pass through a series of fine pores, each with a diameter less than 50 nm, under the influence of a suitable transdermal gradient. Therefore, it is desirable to use a liposome which is highly deformable and able to pass through such fine pores.

[0158] Further advantages of liposomes include; liposomes obtained from natural phospholipids are biocompatible and biodegradable; liposomes can incorporate a wide range of water and lipid soluble drugs; liposomes can protect encapsulated drugs in their internal compartments from metabolism and degradation (Rosoff, in Pharmaceutical Dosage Forms, Lieberman, Rieger and Banker (Eds.), 1988, Marcel Dekker, Inc., New York, N.Y., volume 1, p. 245). Important considerations in the preparation of liposome formulations are the lipid surface charge, vesicle size and the aqueous volume of the liposomes.

[0159] Liposomes are useful for the transfer and delivery of active ingredients to the site of action. Because the liposomal membrane is structurally similar to biological membranes, when liposomes are applied to a tissue, the liposomes start to merge with the cellular membranes and as the merging of the liposome and cell progresses, the liposomal contents are emptied into the cell where the active agent may act.

[0160] Liposomal formulations have been the focus of extensive investigation as the mode of delivery for many drugs. There is growing evidence that for topical administration, liposomes present several advantages over other formulations. Such advantages include reduced side-effects related to high systemic absorption of the administered drug, increased accumulation of the administered drug at the desired target, and the ability to administer a wide variety of drugs, both hydrophilic and hydrophobic, into the skin.

[0161] Several reports have detailed the ability of liposomes to deliver agents including high-molecular weight DNA into the skin. Compounds including analgesics, antibodies, hormones and high-molecular weight DNAs have been administered to the skin. The majority of applications resulted in the targeting of the upper epidermis

[0162] Liposomes fall into two broad classes. Cationic liposomes are positively charged liposomes which interact with the negatively charged DNA molecules to form a stable complex. The positively charged DNA/liposome complex binds to the negatively charged cell surface and is internalized in an endosome. Due to the acidic pH within the endosome, the liposomes are ruptured, releasing their contents into the cell cytoplasm (Wang et al., Biochem. Biophys. Res. Commun., 1987, 147, 980-985).

[0163] Liposomes which are pH-sensitive or negatively-charged, entrap DNA rather than complex with it. Since both the DNA and the lipid are similarly charged, repulsion rather than complex formation occurs. Nevertheless, some DNA is entrapped within the aqueous interior of these liposomes. pH-sensitive liposomes have been used to deliver DNA encoding the thymidine kinase gene to cell monolayers in culture. Expression of the exogenous gene was detected in the target cells (Zhou et al., Journal of Controlled Release, 1992, 19, 269-274).

[0164] One major type of liposomal composition includes phospholipids other than naturally-derived phosphatidylcholine. Neutral liposome compositions, for example, can be formed from dimyristoyl phosphatidylcholine (DMPC) or dipalmitoyl phosphatidylcholine (DPPC). Anionic liposome compositions generally are formed from dimyristoyl phosphatidylglycerol, while anionic fusogenic liposomes are formed primarily from dioleoyl phosphatidylethanolamine (DOPE). Another type of liposomal composition is formed from phosphatidylcholine (PC) such as, for example, soybean PC, and egg PC. Another type is formed from mixtures of phospholipid and/or phosphatidylcholine and/or cholesterol.

[0165] Several studies have assessed the topical delivery of liposomal drug formulations to the skin. Application of liposomes containing interferon to guinea pig skin resulted in a reduction of skin herpes sores while delivery of interferon via other means (e.g., as a solution or as an emulsion) were ineffective (Weiner et al., Journal of Drug Targeting, 1992, 2, 405-410). Further, an additional study tested the efficacy of interferon administered as part of a liposomal formulation to the administration of interferon using an aqueous system, and concluded that the liposomal formulation was superior to aqueous administration (du Plessis et al., Antiviral Research, 1992, 18, 259-265).

[0166] Non-ionic liposomal systems have also been examined to determine their utility in the delivery of drugs to the skin, in particular systems comprising non-ionic surfactant and cholesterol. Non-ionic liposomal formulations comprising Novasome™ I (glyceryl dilaurate/cholesterol/polyoxyethylene-10-stearyl ether) and Novasome™ II (glyceryl distearate/cholesterol/polyoxyethylene-10-stearyl ether) were used to deliver cyclosporin-A into the dermis of mouse skin. Results indicated that such non-ionic liposomal systems were effective in facilitating the deposition of cyclosporin-A into different layers of the skin (Hu et al. S.T.P.Pharma. Sci., 1994, 4, 6, 466).

[0167] Liposomes also include “sterically stabilized” liposomes, a term which, as used herein, refers to liposomes comprising one or more specialized lipids that, when incorporated into liposomes, result in enhanced circulation lifetimes relative to liposomes lacking such specialized lipids. Examples of sterically stabilized liposomes are those in which part of the vesicle-forming lipid portion of the liposome (A) comprises one or more glycolipids, such as monosialoganglioside G_{M1}, or (B) is derivatized with one or more hydrophilic polymers, such as a polyethylene glycol (PEG) moiety. While not wishing to be bound by any particular theory, it is thought in the art that, at least for sterically stabilized liposomes containing gangliosides, sphingomyelin, or PEG-derivatized lipids, the enhanced circulation half-life of these sterically stabilized liposomes derives from a reduced uptake into cells of the reticuloendothelial system (RES) (Allen et al., FEBS Letters, 1987, 223, 42; Wu et al., Cancer Research, 1993, 53, 3765).

[0168] Various liposomes comprising one or more glycolipids are known in the art. Papahadjopoulos et al. (Ann. N.Y. Acad. Sci., 1987, 507, 64) reported the ability of monosialoganglioside G_{M1}, galactocerebroside sulfate and phosphatidylinositol to improve blood half-lives of liposomes. These findings were expounded upon by Gabizon et al. (Proc. Natl. Acad. Sci. U.S.A., 1988, 85, 6949). U.S. Pat. No. 4,837,028 and WO 88/04924, both to Allen et al., disclose liposomes comprising (1) sphingomyelin and (2) the ganglioside G_{M1} or a galactocerebroside sulfate ester. U.S. Pat. No. 5,543,152 (Webb et al.) discloses liposomes comprising sphingomyelin. Liposomes comprising 1,2-sn-dimyristoylphosphatidylcholine are disclosed in WO 97/13499 (Lim et al).

[0169] Many liposomes comprising lipids derivatized with one or more hydrophilic polymers, and methods of preparation thereof, are known in the art. Sunamoto et al. (Bull. Chem. Soc. Jpn., 1980, 53, 2778) described liposomes comprising a nonionic detergent, 2C_{1215G}, that contains a PEG moiety. Illum et al. (FEBS Lett., 1984, 167, 79) noted that hydrophilic coating of polystyrene particles with polymeric glycols results in significantly enhanced blood half-lives. Synthetic phospholipids modified by the attachment of carboxylic groups of polyalkylene glycols (e.g., PEG) are described by Sears (U.S. Pat. Nos. 4,426,330 and 4,534,899). Klibanov et al. (FEBS Lett., 1990, 268, 235) described experiments demonstrating that liposomes comprising phosphatidylethanolamine (PE) derivatized with PEG or PEG stearate have significant increases in blood circulation half-lives. Blume et al. (Biochimica et Biophysica Acta, 1990, 1029, 91) extended such observations to other PEG-derivatized phospholipids, e.g., DSPE-PEG, formed from the combination of distearoylphosphatidylethanolamine (DSPE) and PEG. Liposomes having covalently bound PEG moieties on their external surface are described in European Patent No. EP 0 445 131 B1 and WO 90/04384 to Fisher. Liposome compositions containing 1-20 mole percent of PE derivatized with PEG, and methods of use thereof, are described by Woodle et al. (U.S. Pat. Nos. 5,013,556 and 5,356,633) and Martin et al. (U.S. Pat. No. 5,213,804 and European Patent No. EP 0 496 813 B1). Liposomes comprising a number of other lipid-polymer conjugates are disclosed in WO 91/05545 and U.S. Pat. No. 5,225,212 (both to Martin et al.) and in WO 94/20073 (Zalipsky et al.) Liposomes comprising PEG-modified ceramide lipids are described in WO 96/10391 (Choi et al). U.S. Pat. No. 5,540,935 (Miyazaki et al.) and U.S. Pat. No. 5,556,948 (Tagawa et al.) describe PEG-containing liposomes that can be further derivatized with functional moieties on their surfaces.

[0170] A number of liposomes comprising nucleic acids are known in the art. WO 96/40062 to Thierry et al. discloses methods for encapsulating high molecular weight nucleic acids in liposomes. U.S. Pat. No. 5,264,221 to Tagawa et al. discloses protein-bonded liposomes and asserts that the contents of such liposomes may include a dsRNA. U.S. Pat. No. 5,665,710 to Rahman et al. describes certain methods of encapsulating oligodeoxynucleotides in liposomes. WO 97/04787 to Love et al. discloses liposomes comprising dsRNAs targeted to the raf gene.

[0171] Transfersomes are yet another type of liposomes, and are highly deformable lipid aggregates which are attractive candidates for drug delivery vehicles. Transfersomes may be described as lipid droplets which are so highly deformable that they are easily able to penetrate through pores which are smaller than the droplet. Transfersomes are adaptable to the environment in which they are used, e.g., they are self-optimizing (adaptive to the shape of pores in the skin), self-repairing, frequently reach their targets without fragmenting, and often self-loading. To make transfersomes it is possible to add surface edge-activators, usually surfactants, to a standard liposomal composition. Transfersomes have been used to deliver serum albumin to the skin. The transfersome-mediated delivery of serum albumin has been shown to be as effective as subcutaneous injection of a solution containing serum albumin.

[0172] Surfactants find wide application in formulations such as emulsions (including microemulsions) and liposomes. The most common way of classifying and ranking the properties of the many different types of surfactants, both natural and synthetic, is by the use of the hydrophile/lipophile balance (HLB). The nature of the hydrophilic group (also known as the “head”) provides the most useful means for categorizing the different surfactants used in formulations (Rieger, in Pharmaceutical Dosage Forms, Marcel Dekker, Inc., New York, N.Y., 1988, p. 285).

[0173] If the surfactant molecule is not ionized, it is classified as a nonionic surfactant. Nonionic surfactants find wide application in pharmaceutical and cosmetic products and are usable over a wide range of pH values. In general their HLB values range from 2 to about 18 depending on their structure. Nonionic surfactants include nonionic esters such as ethylene glycol esters, propylene glycol esters, glyceryl esters, polyglyceryl esters, sorbitan esters, sucrose esters, and ethoxylated esters. Nonionic alkanolamides and ethers such as fatty alcohol ethoxylates, propoxylated alcohols, and ethoxylated/propoxylated block polymers are also included in this class. The polyoxyethylene surfactants are the most popular members of the nonionic surfactant class.

[0174] If the surfactant molecule carries a negative charge when it is dissolved or dispersed in water, the surfactant is classified as anionic. Anionic surfactants include carboxylates such as soaps, acyl lactylates, acyl amides of amino acids, esters of sulfuric acid such as alkyl sulfates and ethoxylated alkyl sulfates, sulfonates such as alkyl benzene sulfonates, acyl isethionates, acyl taurates and sulfosuccinates, and phosphates. The most important members of the anionic surfactant class are the alkyl sulfates and the soaps.

[0175] If the surfactant molecule carries a positive charge when it is dissolved or dispersed in water, the surfactant is classified as cationic. Cationic surfactants include quaternary ammonium salts and ethoxylated amines. The quaternary ammonium salts are the most used members of this class.

[0176] If the surfactant molecule has the ability to carry either a positive or negative charge, the surfactant is classified as amphoteric. Amphoteric surfactants include acrylic acid derivatives, substituted alkylamides, N-alkylbetaines and phosphatides.

[0177] The use of surfactants in drug products, formulations and in emulsions has been reviewed (Rieger, in Pharmaceutical Dosage Forms, Marcel Dekker, Inc., New York, N.Y., 1988, p. 285).

[0178] Nucleic Acid Lipid Particles

[0179] In one embodiment, a TTR dsRNA featured in the invention is fully encapsulated in the lipid formulation, e.g., to form a SPLP, pSPLP, SNALP, or other nucleic acid-lipid particle. As used herein, the term “SNALP” refers to a stable nucleic acid-lipid particle, including SPLP. As used herein, the term “SPLP” refers to a nucleic acid-lipid particle comprising plasmid DNA encapsulated within a lipid vesicle. SNALPs and SPLPs typically contain a cationic lipid, a non-cationic lipid, and a lipid that prevents aggregation of the particle (e.g., a PEG-lipid conjugate). SNALPs and SPLPs are extremely useful for systemic applications, as they exhibit extended circulation lifetimes following intravenous (i.v.) injection and accumulate at distal sites (e.g., sites physically separated from the administration site). SPLPs include “pSPLP,” which include an encapsulated condensing agent-nucleic acid complex as set forth in PCT Publication No. WO 00/03683. The particles of the present invention typically have a mean diameter of about 50 nm to about 150 nm, more typically about 60 nm to about 130 nm, more typically about 70 nm to about 110 nm, most typically about 70 nm to about 90 nm, and are substantially nontoxic. In addition, the nucleic acids when present in the nucleic acid-lipid particles of the present invention are resistant in aqueous solution to degradation with a nuclease. Nucleic acid-lipid particles and their method of preparation are disclosed in, e.g., U.S. Pat. Nos. 5,976,567; 5,981,501; 6,534,484; 6,586,410; 6,815,432; and PCT Publication No. WO 96/40964.

[0180] In one embodiment, the lipid to drug ratio (mass/mass ratio) (e.g., lipid to dsRNA ratio) will be in the range of from about 1:1 to about 50:1, from about 1:1 to about 25:1, from about 3:1 to about 15:1, from about 4:1 to about 10:1, from about 5:1 to about 9:1, or about 6:1 to about 9:1. In some embodiments the lipid to dsRNA ratio can be about 1:1, 2:1, 3:1, 4:1, 5:1, 6:1, 7:1, 8:1, 9:1, 10:1, or 11:1.

[0181] In general, the lipid-nucleic acid particle is suspended in a buffer, e.g., PBS, for administration. In one embodiment, the pH of the lipid formulated siRNA is between 6.8 and 7.8, e.g., 7.3 or 7.4. The osmolality can be, e.g., between 250 and 350 mOsm/kg, e.g., around 300, e.g., 298, 299, 300, 301, 302, 303, 304, or 305.

[0182] The cationic lipid may be, for example, N,N-dioleyl-N,N-dimethylammonium chloride (DODAC), N,N-distearyl-N,N-dimethylammonium bromide (DDAB), N—(I-(2,3-dioleoyloxy)propyl)-N,N,N-trimethylammonium chloride (DOTAP), N—(I-(2,3-dioleyloxy)propyl)-N,N,N-trimethylammonium chloride (DOTMA), N,N-dimethyl-2,3-dioleyloxy)propylamine (DODMA), 1,2-DiLinoleyloxy-N,N-dimethylaminopropane (DLinDMA), 1,2-Dilinolenyloxy-N,N-dimethylaminopropane (DLenDMA), 1,2-Dilinoleylcarbamoyloxy-3-dimethylaminopropane (DLin-C-DAP), 1,2-Dilinoleyoxy-3-(dimethylamino)acetoxypropane (DLin-DAC), 1,2-Dilinoleyoxy-3-morpholinopropane (DLin-MA), 1,2-Dilinoleoyl-3-dimethylaminopropane (DLinDAP), 1,2-Dilinoleylthio-3-dimethylaminopropane (DLin-S-DMA), 1-Linoleoyl-2-linoleyloxy-3-dimethylaminopropane (DLin-2-DMAP), 1,2-Dilinoleyloxy-3-trimethylaminopropane chloride salt (DLin-TMA.Cl), 1,2-Dilinoleoyl-3-trimethylaminopropane chloride salt (DLin-TAP.Cl), 1,2-Dilinoleyloxy-3-(N-methylpiperazino)propane (DLin-MPZ), or 3-(N,N-Dilinoleylamino)-1,2-propanediol (DLinAP), 3-(N,N-Dioleylamino)-1,2-propanedio (DOAP), 1,2-Dilinoleyloxo-3-(2-N,N-dimethylamino)ethoxypropane (DLin-EG-DMA), 1,2-Dilinolenyloxy-N,N-dimethylaminopropane (DLinDMA), 2,2-Dilinoleyl-4-dimethylaminomethyl-[1,3]-dioxolane (DLin-K-DMA) or analogs thereof, (3aR,5s,6aS)—N,N-dimethyl-2,2-di((9Z,12Z)-octadeca-9,12-dienyl)tetrahydro-3aH-cyclopenta[d][1,3]dioxol-5-amine (ALN100), (6Z,9Z,28Z,31Z)-heptatriaconta-6,9,28,31-tetraen-19-yl 4-(dimethylamino)butanoate (MC3), 1,1′-(2-(4-(2-((2-(bis(2-hydroxydodecyl)amino)ethyl)(2-hydroxydodecyl)amino)ethyl)piperazin-1-yl)ethylazanediyl)didodecan-2-ol (Tech G1), or a mixture thereof. The cationic lipid may comprise from about 20 mol % to about 50 mol % or about 40 mol % of the total lipid present in the particle.

[0183] The non-cationic lipid may be an anionic lipid or a neutral lipid including, but not limited to, distearoylphosphatidylcholine (DSPC), dioleoylphosphatidylcholine (DOPC), dipalmitoylphosphatidylcholine (DPPC), dioleoylphosphatidylglycerol (DOPG), dipalmitoylphosphatidylglycerol (DPPG), dioleoyl-phosphatidylethanolamine (DOPE), palmitoyloleoylphosphatidylcholine (POPC), palmitoyloleoylphosphatidylethanolamine (POPE), dioleoyl-phosphatidylethanolamine 4-(N-maleimidomethyl)-cyclohexane-1-carboxylate (DOPE-mal), dipalmitoyl phosphatidyl ethanolamine (DPPE), dimyristoylphosphoethanolamine (DMPE), distearoyl-phosphatidyl-ethanolamine (DSPE), 16-O-monomethyl PE, 16-O-dimethyl PE, 18-1-trans PE, 1-stearoyl-2-oleoyl-phosphatidyethanolamine (SOPE), cholesterol, or a mixture thereof. The non-cationic lipid may be from about 5 mol % to about 90 mol %, about 10 mol %, or about 58 mol % if cholesterol is included, of the total lipid present in the particle.

[0184] The conjugated lipid that inhibits aggregation of particles may be, for example, a polyethyleneglycol (PEG)-lipid including, without limitation, a PEG-diacylglycerol (DAG), a PEG-dialkyloxypropyl (DAA), a PEG-phospholipid, a PEG-ceramide (Cer), or a mixture thereof. The PEG-DAA conjugate may be, for example, a PEG-dilauryloxypropyl (Ci₂), a PEG-dimyristyloxypropyl (Ci₄), a PEG-dipalmityloxypropyl (Cl₆), or a PEG-distearyloxypropyl (C₁₈). Other examples of PEG conjugates include PEG-cDMA (N-[(methoxy poly(ethylene glycol)2000)carbamyl]-1,2-dimyristyloxlpropyl-3-amine), mPEG2000-DMG (mPEG-dimyrystylglycerol (with an average molecular weight of 2,000) and PEG-C-DOMG (R-3-[(ω-methoxy-poly(ethylene glycol)2000)carbamoyl)]-1,2-dimyristyloxlpropyl-3-amine). The conjugated lipid that prevents aggregation of particles may be from 0 mol % to about 20 mol % or about 1.0, 1.1., 1.2, 0.13, 1.4, 1.5, 1.6, 1.7, 1.8, 1.9, or 2 mol % of the total lipid present in the particle.

[0185] In some embodiments, the nucleic acid-lipid particle further includes cholesterol at, e.g., about 10 mol % to about 60 mol % or about 48 mol % of the total lipid present in the particle.

[0186] In one embodiment, the compound 2,2-Dilinoleyl-4-dimethylaminoethyl-[1,3]-dioxolane can be used to prepare lipid-siRNA nanoparticles. Synthesis of 2,2-Dilinoleyl-4-dimethylaminoethyl[1,3]-dioxolane is described in U.S. provisional patent application No. 61/107,998 filed on Oct. 23, 2008, which is herein incorporated by reference.

[0187] For example, the lipid-siRNA particle can include 40% 2, 2-Dilinoleyl-4-dimethylaminoethyl[1,3]-dioxolane: 10% DSPC: 40% Cholesterol: 10% PEG-C-DOMG (mole percent) with a particle size of 63.0±20 nm and a 0.027 siRNA/Lipid Ratio.

[0188] In still another embodiment, the compound 1,1′-(2-(4-(2-((2-(bis(2-hydroxydodecyl)amino)ethyl)(2-hydroxydodecyl)amino)ethyl)piperazin-1-yl)ethylazanediyl)didodecan-2-ol (Tech G1) can be used to prepare lipid-siRNA particles. For example, the dsRNA can be formulated in a lipid formulation comprising Tech-G1, distearoyl phosphatidylcholine (DSPC), cholesterol and mPEG2000-DMG at a molar ratio of 50:10:38.5:1.5 at a total lipid to siRNA ratio of 7:1 (wt:wt).

[0189] LNP01

[0190] In one embodiment, the lipidoid ND98·4HCl (MW 1487) (Formula 1), Cholesterol (Sigma-Aldrich), and PEG-Ceramide C16 (Avanti Polar Lipids) can be used to prepare lipid-siRNA nanoparticles (i.e., LNP01 particles). Stock solutions of each in ethanol can be prepared as follows: ND98, 133 mg/ml; Cholesterol, 25 mg/ml, PEG-Ceramide C16, 100 mg/ml. The ND98, Cholesterol, and PEG-Ceramide C16 stock solutions can then be combined in a, e.g., 42:48:10 molar ratio. The combined lipid solution can be mixed with aqueous siRNA (e.g., in sodium acetate pH 5) such that the final ethanol concentration is about 35-45% and the final sodium acetate concentration is about 100-300 mM. Lipid-siRNA nanoparticles typically form spontaneously upon mixing. Depending on the desired particle size distribution, the resultant nanoparticle mixture can be extruded through a polycarbonate membrane (e.g., 100 nm cut-off) using, for example, a thermobarrel extruder, such as Lipex Extruder (Northern Lipids, Inc). In some cases, the extrusion step can be omitted. Ethanol removal and simultaneous buffer exchange can be accomplished by, for example, dialysis or tangential flow filtration. Buffer can be exchanged with, for example, phosphate buffered saline (PBS) at about pH 7, e.g., about pH 6.9, about pH 7.0, about pH 7.1, about pH 7.2, about pH 7.3, or about pH 7.4.

[chemical structure]

[0191] LNP01 formulations are described, e.g., in International Application Publication No. WO 2008/042973, which is hereby incorporated by reference.

[0192] Additional exemplary lipid-siRNA formulations are as follows:

| | cationic lipid/non-cationic | | |
|---|---|---|---|
| | lipid/cholesterol/PEG-lipid conjugate | | |
| Cationic Lipid | Lipid:siRNA ratio | Process | |
| SNALP | 1,2-Dilinolenyloxy-N,N- | DLinDMA/DPPC/Cholesterol/PEG- | |
| | dimethylaminopropane (DLinDMA) | cDMA | |
| | | (57.1/7.1/34.4/1.4) | |
| | | lipid: siRNA~7:1 | |
| SNALP- | 2,2-Dilinoleyl-4-dimethylaminoethyl- | XTC/DPPC/Cholesterol/PEG-cDMA | |
| XTC | [1,3]-dioxolane (XTC) | 57.1/7.1/34.4/1.4 | |
| | | lipid: siRNA~7:1 | |
| LNP05 | 2,2-Dilinoleyl-4-dimethylaminoethyl- | XTC/DSPC/Cholesterol/PEG-DMG | Extrusion |
| | [1,3]-dioxolane (XTC) | 57.5/7.5/31.5/3.5 | |
| | | lipid: siRNA~6:1 | |
| LNP06 | 2,2-Dilinoleyl-4-dimethylaminoethyl- | XTC/DSPC/Cholesterol/PEG-DMG | Extrusion |
| | [1,3]-dioxolane (XTC) | 57.5/7.5/31.5/3.5 | |
| | | lipid: siRNA~11:1 | |
| LNP07 | 2,2-Dilinoleyl-4-dimethylaminoethyl- | XTC/DSPC/Cholesterol/PEG-DMG | In-line |
| | [1,3]-dioxolane (XTC) | 60/7.5/31/1.5, | mixing |
| | | lipid: siRNA~6:1 | |
| LNP08 | 2,2-Dilinoleyl-4-dimethylaminoethyl- | XTC/DSPC/Cholesterol/PEG-DMG | In-line |
| | [1,3]-dioxolane (XTC) | 60/7.5/31/1.5, | mixing |
| | | lipid: siRNA~11:1 | |
| LNP09 | 2,2-Dilinoleyl-4-dimethylaminoethyl- | XTC/DSPC/Cholesterol/PEG-DMG | In-line |
| | [1,3]-dioxolane (XTC) | 50/10/38.5/1.5 | mixing |
| | | Lipid: siRNA 10:1 | |
| LNP10 | (3aR,5s,6aS)-N,N-dimethyl-2,2- | ALN100/DSPC/Cholesterol/PEG-DMG | In-line |
| | di((9Z,12Z)-octadeca-9,12- | 50/10/38.5/1.5 | mixing |
| | dienyl)tetrahydro-3aH- | Lipid: siRNA 10:1 | |
| | cyclopenta[d][1,3]dioxol-5-amine | | |
| | (ALN100) | | |
| LNP11 | (6Z,9Z,28Z,31Z)-heptatriaconta- | MC-3/DSPC/Cholesterol/PEG-DMG | In-line |
| | 6,9,28,31-tetraen-19-yl 4- | 50/10/38.5/1.5 | mixing |
| | (dimethylamino)butanoate (MC3) | Lipid: siRNA 10:1 | |
| LNP12 | 1,1′-(2-(4-(2-((2-(bis(2- | Tech G1/DSPC/Cholesterol/PEG-DMG | In-line |
| | hydroxydodecyl)amino)ethyl)(2- | 50/10/38.5/1.5 | mixing |
| | hydroxydodecyl)amino)ethyl)piperazin- | Lipid: siRNA 10:1 | |
| | 1-yl)ethylazanediyl)didodecan-2-ol | | |
| | (Tech G1) | | |

[0193] LNP09 formulations and XTC comprising formulations are described, e.g., in U.S. Provisional Ser. No. 61/239,686, filed Sep. 3, 2009, which is hereby incorporated by reference.

[0194] LNP11 formulations and MC3 comprising formulations are described, e.g., in U.S. Provisional Ser. No. 61/244,834, filed Sep. 22, 2009, which is hereby incorporated by reference.

[0195] LNP12 formulations and TechG1 comprising formulations are described, e.g., in U.S. Provisional Ser. No. 61/175,770, filed May 5, 2009, which is hereby incorporated by reference.

[0196] Formulations prepared by either the standard or extrusion-free method can be characterized in similar manners. For example, formulations are typically characterized by visual inspection. They should be whitish translucent solutions free from aggregates or sediment. Particle size and particle size distribution of lipid-nanoparticles can be measured by light scattering using, for example, a Malvern Zetasizer Nano ZS (Malvern, USA). Particles should be about 20-300 nm, such as 40-100 nm in size. The particle size distribution should be unimodal. The total siRNA concentration in the formulation, as well as the entrapped fraction, is estimated using a dye exclusion assay. A sample of the formulated siRNA can be incubated with an RNA-binding dye, such as Ribogreen (Molecular Probes) in the presence or absence of a formulation disrupting surfactant, e.g., 0.5% Triton-X100. The total siRNA in the formulation can be determined by the signal from the sample containing the surfactant, relative to a standard curve. The entrapped fraction is determined by subtracting the “free” siRNA content (as measured by the signal in the absence of surfactant) from the total siRNA content. Percent entrapped siRNA is typically >85%. For SNALP formulation, the particle size is at least 30 nm, at least 40 nm, at least 50 nm, at least 60 nm, at least 70 nm, at least 80 nm, at least 90 nm, at least 100 nm, at least 110 nm, and at least 120 nm. The suitable range is typically about at least 50 nm to about at least 110 nm, about at least 60 nm to about at least 100 nm, or about at least 80 nm to about at least 90 nm.

[0197] Compositions and formulations for oral administration include powders or granules, microparticulates, nanoparticulates, suspensions or solutions in water or non-aqueous media, capsules, gel capsules, sachets, tablets or minitablets. Thickeners, flavoring agents, diluents, emulsifiers, dispersing aids or binders may be desirable. In some embodiments, oral formulations are those in which dsRNAs featured in the invention are administered in conjunction with one or more penetration enhancers surfactants and chelators. Suitable surfactants include fatty acids and/or esters or salts thereof, bile acids and/or salts thereof. Suitable bile acids/salts include chenodeoxycholic acid (CDCA) and ursodeoxychenodeoxycholic acid (UDCA), cholic acid, dehydrocholic acid, deoxycholic acid, glucholic acid, glycholic acid, glycodeoxycholic acid, taurocholic acid, taurodeoxycholic acid, sodium tauro-24,25-dihydro-fusidate and sodium glycodihydrofusidate. Suitable fatty acids include arachidonic acid, undecanoic acid, oleic acid, lauric acid, caprylic acid, capric acid, myristic acid, palmitic acid, stearic acid, linoleic acid, linolenic acid, dicaprate, tricaprate, monoolein, dilaurin, glyceryl 1-monocaprate, 1-dodecylazacycloheptan-2-one, an acylcarnitine, an acylcholine, or a monoglyceride, a diglyceride or a pharmaceutically acceptable salt thereof (e.g., sodium). In some embodiments, combinations of penetration enhancers are used, for example, fatty acids/salts in combination with bile acids/salts. One exemplary combination is the sodium salt of lauric acid, capric acid and UDCA. Further penetration enhancers include polyoxyethylene-9-lauryl ether, polyoxyethylene-20-cetyl ether. DsRNAs featured in the invention may be delivered orally, in granular form including sprayed dried particles, or complexed to form micro or nanoparticles. DsRNA complexing agents include poly-amino acids; polyimines; polyacrylates; polyalkylacrylates, polyoxethanes, polyalkylcyanoacrylates; cationized gelatins, albumins, starches, acrylates, polyethyleneglycols (PEG) and starches; polyalkylcyanoacrylates; DEAE-derivatized polyimines, pollulans, celluloses and starches. Suitable complexing agents include chitosan, N-trimethylchitosan, poly-L-lysine, polyhistidine, polyornithine, polyspermines, protamine, polyvinylpyridine, polythiodiethylaminomethylethylene P(TDAE), polyaminostyrene (e.g., p-amino), poly(methylcyanoacrylate), poly(ethylcyanoacrylate), poly(butylcyanoacrylate), poly(isobutylcyanoacrylate), poly(isohexylcynaoacrylate), DEAE-methacrylate, DEAE-hexylacrylate, DEAE-acrylamide, DEAE-albumin and DEAE-dextran, polymethylacrylate, polyhexylacrylate, poly(D,L-lactic acid), poly(DL-lactic-co-glycolic acid (PLGA), alginate, and polyethyleneglycol (PEG). Oral formulations for dsRNAs and their preparation are described in detail in U.S. Pat. No. 6,887,906, US Publn. No. 20030027780, and U.S. Pat. No. 6,747,014, each of which is incorporated herein by reference.

[0198] Compositions and formulations for parenteral, intraparenchymal (into the brain), intrathecal, intraventricular or intrahepatic administration may include sterile aqueous solutions which may also contain buffers, diluents and other suitable additives such as, but not limited to, penetration enhancers, carrier compounds and other pharmaceutically acceptable carriers or excipients.

[0199] Pharmaceutical compositions of the present invention include, but are not limited to, solutions, emulsions, and liposome-containing formulations. These compositions may be generated from a variety of components that include, but are not limited to, preformed liquids, self-emulsifying solids and self-emulsifying semisolids. Particularly preferred are formulations that target the liver when treating hepatic disorders such as hepatic carcinoma.

[0200] The pharmaceutical formulations of the present invention, which may conveniently be presented in unit dosage form, may be prepared according to conventional techniques well known in the pharmaceutical industry. Such techniques include the step of bringing into association the active ingredients with the pharmaceutical carrier(s) or excipient(s). In general, the formulations are prepared by uniformly and intimately bringing into association the active ingredients with liquid carriers or finely divided solid carriers or both, and then, if necessary, shaping the product.

[0201] The compositions of the present invention may be formulated into any of many possible dosage forms such as, but not limited to, tablets, capsules, gel capsules, liquid syrups, soft gels, suppositories, and enemas. The compositions of the present invention may also be formulated as suspensions in aqueous, non-aqueous or mixed media. Aqueous suspensions may further contain substances which increase the viscosity of the suspension including, for example, sodium carboxymethylcellulose, sorbitol and/or dextran. The suspension may also contain stabilizers.

[0202] Emulsions

[0203] The compositions of the present invention may be prepared and formulated as emulsions. Emulsions are typically heterogeneous systems of one liquid dispersed in another in the form of droplets usually exceeding 0.1 μm in diameter (Idson, in Pharmaceutical Dosage Forms, Lieberman, Rieger and Banker (Eds.), 1988, Marcel Dekker, Inc., New York, N.Y., volume 1, p. 199; Rosoff, in Pharmaceutical Dosage Forms, Lieberman, Rieger and Banker (Eds.), 1988, Marcel Dekker, Inc., New York, N.Y., Volume 1, p. 245; Block in Pharmaceutical Dosage Forms, Lieberman, Rieger and Banker (Eds.), 1988, Marcel Dekker, Inc., New York, N.Y., volume 2, p. 335; Higuchi et al., in Remington's Pharmaceutical Sciences, Mack Publishing Co., Easton, Pa., 1985, p. 301). Emulsions are often biphasic systems comprising two immiscible liquid phases intimately mixed and dispersed with each other. In general, emulsions may be of either the water-in-oil (w/o) or the oil-in-water (o/w) variety. When an aqueous phase is finely divided into and dispersed as minute droplets into a bulk oily phase, the resulting composition is called a water-in-oil (w/o) emulsion. Alternatively, when an oily phase is finely divided into and dispersed as minute droplets into a bulk aqueous phase, the resulting composition is called an oil-in-water (o/w) emulsion. Emulsions may contain additional components in addition to the dispersed phases, and the active drug which may be present as a solution in either the aqueous phase, oily phase or itself as a separate phase. Pharmaceutical excipients such as emulsifiers, stabilizers, dyes, and anti-oxidants may also be present in emulsions as needed. Pharmaceutical emulsions may also be multiple emulsions that are comprised of more than two phases such as, for example, in the case of oil-in-water-in-oil (o/w/o) and water-in-oil-in-water (w/o/w) emulsions. Such complex formulations often provide certain advantages that simple binary emulsions do not. Multiple emulsions in which individual oil droplets of an o/w emulsion enclose small water droplets constitute a w/o/w emulsion. Likewise a system of oil droplets enclosed in globules of water stabilized in an oily continuous phase provides an o/w/o emulsion.

[0204] Emulsions are characterized by little or no thermodynamic stability. Often, the dispersed or discontinuous phase of the emulsion is well dispersed into the external or continuous phase and maintained in this form through the means of emulsifiers or the viscosity of the formulation. Either of the phases of the emulsion may be a semisolid or a solid, as is the case of emulsion-style ointment bases and creams. Other means of stabilizing emulsions entail the use of emulsifiers that may be incorporated into either phase of the emulsion. Emulsifiers may broadly be classified into four categories: synthetic surfactants, naturally occurring emulsifiers, absorption bases, and finely dispersed solids (Idson, in Pharmaceutical Dosage Forms, Lieberman, Rieger and Banker (Eds.), 1988, Marcel Dekker, Inc., New York, N.Y., volume 1, p. 199).

[0205] Synthetic surfactants, also known as surface active agents, have found wide applicability in the formulation of emulsions and have been reviewed in the literature (Rieger, in Pharmaceutical Dosage Forms, Lieberman, Rieger and Banker (Eds.), 1988, Marcel Dekker, Inc., New York, N.Y., volume 1, p. 285; Idson, in Pharmaceutical Dosage Forms, Lieberman, Rieger and Banker (Eds.), Marcel Dekker, Inc., New York, N.Y., 1988, volume 1, p. 199). Surfactants are typically amphiphilic and comprise a hydrophilic and a hydrophobic portion. The ratio of the hydrophilic to the hydrophobic nature of the surfactant has been termed the hydrophile/lipophile balance (HLB) and is a valuable tool in categorizing and selecting surfactants in the preparation of formulations. Surfactants may be classified into different classes based on the nature of the hydrophilic group: nonionic, anionic, cationic and amphoteric (Rieger, in Pharmaceutical Dosage Forms, Lieberman, Rieger and Banker (Eds.), 1988, Marcel Dekker, Inc., New York, N.Y., volume 1, p. 285).

[0206] Naturally occurring emulsifiers used in emulsion formulations include lanolin, beeswax, phosphatides, lecithin and acacia. Absorption bases possess hydrophilic properties such that they can soak up water to form w/o emulsions yet retain their semisolid consistencies, such as anhydrous lanolin and hydrophilic petrolatum. Finely divided solids have also been used as good emulsifiers especially in combination with surfactants and in viscous preparations. These include polar inorganic solids, such as heavy metal hydroxides, nonswelling clays such as bentonite, attapulgite, hectorite, kaolin, montmorillonite, colloidal aluminum silicate and colloidal magnesium aluminum silicate, pigments and nonpolar solids such as carbon or glyceryl tristearate.

[0207] A large variety of non-emulsifying materials are also included in emulsion formulations and contribute to the properties of emulsions. These include fats, oils, waxes, fatty acids, fatty alcohols, fatty esters, humectants, hydrophilic colloids, preservatives and antioxidants (Block, in Pharmaceutical Dosage Forms, Lieberman, Rieger and Banker (Eds.), 1988, Marcel Dekker, Inc., New York, N.Y., volume 1, p. 335; Idson, in Pharmaceutical Dosage Forms, Lieberman, Rieger and Banker (Eds.), 1988, Marcel Dekker, Inc., New York, N.Y., volume 1, p. 199).

[0208] Hydrophilic colloids or hydrocolloids include naturally occurring gums and synthetic polymers such as polysaccharides (for example, acacia, agar, alginic acid, carrageenan, guar gum, karaya gum, and tragacanth), cellulose derivatives (for example, carboxymethylcellulose and carboxypropylcellulose), and synthetic polymers (for example, carbomers, cellulose ethers, and carboxyvinyl polymers). These disperse or swell in water to form colloidal solutions that stabilize emulsions by forming strong interfacial films around the dispersed-phase droplets and by increasing the viscosity of the external phase.

[0209] Since emulsions often contain a number of ingredients such as carbohydrates, proteins, sterols and phosphatides that may readily support the growth of microbes, these formulations often incorporate preservatives. Commonly used preservatives included in emulsion formulations include methyl paraben, propyl paraben, quaternary ammonium salts, benzalkonium chloride, esters of p-hydroxybenzoic acid, and boric acid. Antioxidants are also commonly added to emulsion formulations to prevent deterioration of the formulation. Antioxidants used may be free radical scavengers such as tocopherols, alkyl gallates, butylated hydroxyanisole, butylated hydroxytoluene, or reducing agents such as ascorbic acid and sodium metabisulfite, and antioxidant synergists such as citric acid, tartaric acid, and lecithin.

[0210] The application of emulsion formulations via dermatological, oral and parenteral routes and methods for their manufacture have been reviewed in the literature (Idson, in Pharmaceutical Dosage Forms, Lieberman, Rieger and Banker (Eds.), 1988, Marcel Dekker, Inc., New York, N.Y., volume 1, p. 199). Emulsion formulations for oral delivery have been very widely used because of ease of formulation, as well as efficacy from an absorption and bioavailability standpoint (Rosoff, in Pharmaceutical Dosage Forms, Lieberman, Rieger and Banker (Eds.), 1988, Marcel Dekker, Inc., New York, N.Y., volume 1, p. 245; Idson, in Pharmaceutical Dosage Forms, Lieberman, Rieger and Banker (Eds.), 1988, Marcel Dekker, Inc., New York, N.Y., volume 1, p. 199). Mineral-oil base laxatives, oil-soluble vitamins and high fat nutritive preparations are among the materials that have commonly been administered orally as o/w emulsions.

[0211] In one embodiment of the present invention, the compositions of dsRNAs and nucleic acids are formulated as microemulsions. A microemulsion may be defined as a system of water, oil and amphiphile which is a single optically isotropic and thermodynamically stable liquid solution (Rosoff, in Pharmaceutical Dosage Forms, Lieberman, Rieger and Banker (Eds.), 1988, Marcel Dekker, Inc., New York, N.Y., volume 1, p. 245). Typically microemulsions are systems that are prepared by first dispersing an oil in an aqueous surfactant solution and then adding a sufficient amount of a fourth component, generally an intermediate chain-length alcohol to form a transparent system. Therefore, microemulsions have also been described as thermodynamically stable, isotropically clear dispersions of two immiscible liquids that are stabilized by interfacial films of surface-active molecules (Leung and Shah, in: Controlled Release of Drugs: Polymers and Aggregate Systems, Rosoff, M., Ed., 1989, VCH Publishers, New York, pages 185-215). Microemulsions commonly are prepared via a combination of three to five components that include oil, water, surfactant, cosurfactant and electrolyte. Whether the microemulsion is of the water-in-oil (w/o) or an oil-in-water (o/w) type is dependent on the properties of the oil and surfactant used and on the structure and geometric packing of the polar heads and hydrocarbon tails of the surfactant molecules (Schott, in Remington's Pharmaceutical Sciences, Mack Publishing Co., Easton, Pa., 1985, p. 271).

[0212] The phenomenological approach utilizing phase diagrams has been extensively studied and has yielded a comprehensive knowledge, to one skilled in the art, of how to formulate microemulsions (Rosoff, in Pharmaceutical Dosage Forms, Lieberman, Rieger and Banker (Eds.), 1988, Marcel Dekker, Inc., New York, N.Y., volume 1, p. 245; Block, in Pharmaceutical Dosage Forms, Lieberman, Rieger and Banker (Eds.), 1988, Marcel Dekker, Inc., New York, N.Y., volume 1, p. 335). Compared to conventional emulsions, microemulsions offer the advantage of solubilizing water-insoluble drugs in a formulation of thermodynamically stable droplets that are formed spontaneously.

[0213] Surfactants used in the preparation of microemulsions include, but are not limited to, ionic surfactants, non-ionic surfactants, Brij 96, polyoxyethylene oleyl ethers, polyglycerol fatty acid esters, tetraglycerol monolaurate (ML310), tetraglycerol monooleate (MO310), hexaglycerol monooleate (PO310), hexaglycerol pentaoleate (PO500), decaglycerol monocaprate (MCA750), decaglycerol monooleate (MO750), decaglycerol sequioleate (SO750), decaglycerol decaoleate (DAO750), alone or in combination with cosurfactants. The cosurfactant, usually a short-chain alcohol such as ethanol, 1-propanol, and 1-butanol, serves to increase the interfacial fluidity by penetrating into the surfactant film and consequently creating a disordered film because of the void space generated among surfactant molecules. Microemulsions may, however, be prepared without the use of cosurfactants and alcohol-free self-emulsifying microemulsion systems are known in the art. The aqueous phase may typically be, but is not limited to, water, an aqueous solution of the drug, glycerol, PEG300, PEG400, polyglycerols, propylene glycols, and derivatives of ethylene glycol. The oil phase may include, but is not limited to, materials such as Captex 300, Captex 355, Capmul MCM, fatty acid esters, medium chain (C8-C12) mono, di, and tri-glycerides, polyoxyethylated glyceryl fatty acid esters, fatty alcohols, polyglycolized glycerides, saturated polyglycolized C8-C10 glycerides, vegetable oils and silicone oil.

[0214] Microemulsions are particularly of interest from the standpoint of drug solubilization and the enhanced absorption of drugs. Lipid based microemulsions (both o/w and w/o) have been proposed to enhance the oral bioavailability of drugs, including peptides (Constantinides et al., Pharmaceutical Research, 1994, 11, 1385-1390; Ritschel, Meth. Find. Exp. Clin. Pharmacol., 1993, 13, 205). Microemulsions afford advantages of improved drug solubilization, protection of drug from enzymatic hydrolysis, possible enhancement of drug absorption due to surfactant-induced alterations in membrane fluidity and permeability, ease of preparation, ease of oral administration over solid dosage forms, improved clinical potency, and decreased toxicity (Constantinides et al., Pharmaceutical Research, 1994, 11, 1385; Ho et al., J. Pharm. Sci., 1996, 85, 138-143). Often microemulsions may form spontaneously when their components are brought together at ambient temperature. This may be particularly advantageous when formulating thermolabile drugs, peptides or dsRNAs. Microemulsions have also been effective in the transdermal delivery of active components in both cosmetic and pharmaceutical applications. It is expected that the microemulsion compositions and formulations of the present invention will facilitate the increased systemic absorption of dsRNAs and nucleic acids from the gastrointestinal tract, as well as improve the local cellular uptake of dsRNAs and nucleic acids.

[0215] Microemulsions of the present invention may also contain additional components and additives such as sorbitan monostearate (Grill 3), Labrasol, and penetration enhancers to improve the properties of the formulation and to enhance the absorption of the dsRNAs and nucleic acids of the present invention. Penetration enhancers used in the microemulsions of the present invention may be classified as belonging to one of five broad categories—surfactants, fatty acids, bile salts, chelating agents, and non-chelating non-surfactants (Lee et al., Critical Reviews in Therapeutic Drug Carrier Systems, 1991, p. 92). Each of these classes has been discussed above.

[0216] Penetration Enhancers

[0217] In one embodiment, the present invention employs various penetration enhancers to effect the efficient delivery of nucleic acids, particularly dsRNAs, to the skin of animals. Most drugs are present in solution in both ionized and nonionized forms. However, usually only lipid soluble or lipophilic drugs readily cross cell membranes. It has been discovered that even non-lipophilic drugs may cross cell membranes if the membrane to be crossed is treated with a penetration enhancer. In addition to aiding the diffusion of non-lipophilic drugs across cell membranes, penetration enhancers also enhance the permeability of lipophilic drugs.

[0218] Penetration enhancers may be classified as belonging to one of five broad categories, i.e., surfactants, fatty acids, bile salts, chelating agents, and non-chelating non-surfactants (Lee et al., Critical Reviews in Therapeutic Drug Carrier Systems, 1991, p. 92). Each of the above mentioned classes of penetration enhancers are described below in greater detail.

[0219] Surfactants: In connection with the present invention, surfactants (or “surface-active agents”) are chemical entities which, when dissolved in an aqueous solution, reduce the surface tension of the solution or the interfacial tension between the aqueous solution and another liquid, with the result that absorption of dsRNAs through the mucosa is enhanced. In addition to bile salts and fatty acids, these penetration enhancers include, for example, sodium lauryl sulfate, polyoxyethylene-9-lauryl ether and polyoxyethylene-20-cetyl ether) (Lee et al., Critical Reviews in Therapeutic Drug Carrier Systems, 1991, p. 92); and perfluorochemical emulsions, such as FC-43. Takahashi et al., J. Pharm. Pharmacol., 1988, 40, 252).

[0220] Fatty acids: Various fatty acids and their derivatives which act as penetration enhancers include, for example, oleic acid, lauric acid, capric acid (n-decanoic acid), myristic acid, palmitic acid, stearic acid, linoleic acid, linolenic acid, dicaprate, tricaprate, monoolein (1-monooleoyl-rac-glycerol), dilaurin, caprylic acid, arachidonic acid, glycerol 1-monocaprate, 1-dodecylazacycloheptan-2-one, acylcarnitines, acylcholines, C.sub.1-10 alkyl esters thereof (e.g., methyl, isopropyl and t-butyl), and mono- and di-glycerides thereof (i.e., oleate, laurate, caprate, myristate, palmitate, stearate, linoleate, etc.) (Lee et al., Critical Reviews in Therapeutic Drug Carrier Systems, 1991, p. 92; Muranishi, Critical Reviews in Therapeutic Drug Carrier Systems, 1990, 7, 1-33; El Hariri et al., J. Pharm. Pharmacol., 1992, 44, 651-654).

[0221] Bile salts: The physiological role of bile includes the facilitation of dispersion and absorption of lipids and fat-soluble vitamins (Brunton, Chapter 38 in: Goodman & Gilman's The Pharmacological Basis of Therapeutics, 9th Ed., Hardman et al. Eds., McGraw-Hill, New York, 1996, pp. 934-935). Various natural bile salts, and their synthetic derivatives, act as penetration enhancers. Thus the term “bile salts” includes any of the naturally occurring components of bile as well as any of their synthetic derivatives. Suitable bile salts include, for example, cholic acid (or its pharmaceutically acceptable sodium salt, sodium cholate), dehydrocholic acid (sodium dehydrocholate), deoxycholic acid (sodium deoxycholate), glucholic acid (sodium glucholate), glycholic acid (sodium glycocholate), glycodeoxycholic acid (sodium glycodeoxycholate), taurocholic acid (sodium taurocholate), taurodeoxycholic acid (sodium taurodeoxycholate), chenodeoxycholic acid (sodium chenodeoxycholate), ursodeoxycholic acid (UDCA), sodium tauro-24,25-dihydro-fusidate (STDHF), sodium glycodihydrofusidate and polyoxyethylene-9-lauryl ether (POE) (Lee et al., Critical Reviews in Therapeutic Drug Carrier Systems, 1991, page 92; Swinyard, Chapter 39 In: Remington's Pharmaceutical Sciences, 18th Ed., Gennaro, ed., Mack Publishing Co., Easton, Pa., 1990, pages 782-783; Muranishi, Critical Reviews in Therapeutic Drug Carrier Systems, 1990, 7, 1-33; Yamamoto et al., J. Pharm. Exp. Ther., 1992, 263, 25; Yamashita et al., J. Pharm. Sci., 1990, 79, 579-583).

[0222] Chelating Agents: Chelating agents, as used in connection with the present invention, can be defined as compounds that remove metallic ions from solution by forming complexes therewith, with the result that absorption of dsRNAs through the mucosa is enhanced. With regards to their use as penetration enhancers in the present invention, chelating agents have the added advantage of also serving as DNase inhibitors, as most characterized DNA nucleases require a divalent metal ion for catalysis and are thus inhibited by chelating agents (Jarrett, J. Chromatogr., 1993, 618, 315-339). Suitable chelating agents include but are not limited to disodium ethylenediaminetetraacetate (EDTA), citric acid, salicylates (e.g., sodium salicylate, 5-methoxysalicylate and homovanilate), N-acyl derivatives of collagen, laureth-9 and N-amino acyl derivatives of beta-diketones (enamines)(Lee et al., Critical Reviews in Therapeutic Drug Carrier Systems, 1991, page 92; Muranishi, Critical Reviews in Therapeutic Drug Carrier Systems, 1990, 7, 1-33; Buur et al., J. Control Rel., 1990, 14, 43-51).

[0223] Non-chelating non-surfactants: As used herein, non-chelating non-surfactant penetration enhancing compounds can be defined as compounds that demonstrate insignificant activity as chelating agents or as surfactants but that nonetheless enhance absorption of dsRNAs through the alimentary mucosa (Muranishi, Critical Reviews in Therapeutic Drug Carrier Systems, 1990, 7, 1-33). This class of penetration enhancers include, for example, unsaturated cyclic ureas, 1-alkyl- and 1-alkenylazacyclo-alkanone derivatives (Lee et al., Critical Reviews in Therapeutic Drug Carrier Systems, 1991, page 92); and non-steroidal anti-inflammatory agents such as diclofenac sodium, indomethacin and phenylbutazone (Yamashita et al., J. Pharm. Pharmacol., 1987, 39, 621-626).

[0224] Carriers

[0225] Certain compositions of the present invention also incorporate carrier compounds in the formulation. As used herein, “carrier compound” or “carrier” can refer to a nucleic acid, or analog thereof, which is inert (i.e., does not possess biological activity per se) but is recognized as a nucleic acid by in vivo processes that reduce the bioavailability of a nucleic acid having biological activity by, for example, degrading the biologically active nucleic acid or promoting its removal from circulation. The coadministration of a nucleic acid and a carrier compound, typically with an excess of the latter substance, can result in a substantial reduction of the amount of nucleic acid recovered in the liver, kidney or other extracirculatory reservoirs, presumably due to competition between the carrier compound and the nucleic acid for a common receptor. For example, the recovery of a partially phosphorothioate dsRNA in hepatic tissue can be reduced when it is coadministered with polyinosinic acid, dextran sulfate, polycytidic acid or 4-acetamido-4′isothiocyano-stilbene-2,2′-disulfonic acid (Miyao et al., DsRNA Res. Dev., 1995, 5, 115-121; Takakura et al., DsRNA & Nucl. Acid Drug Dev., 1996, 6, 177-183.

[0226] Excipients

[0227] In contrast to a carrier compound, a “pharmaceutical carrier” or “excipient” is a pharmaceutically acceptable solvent, suspending agent or any other pharmacologically inert vehicle for delivering one or more nucleic acids to an animal. The excipient may be liquid or solid and is selected, with the planned manner of administration in mind, so as to provide for the desired bulk, consistency, etc., when combined with a nucleic acid and the other components of a given pharmaceutical composition. Typical pharmaceutical carriers include, but are not limited to, binding agents (e.g., pregelatinized maize starch, polyvinylpyrrolidone or hydroxypropyl methylcellulose, etc.); fillers (e.g., lactose and other sugars, microcrystalline cellulose, pectin, gelatin, calcium sulfate, ethyl cellulose, polyacrylates or calcium hydrogen phosphate, etc.); lubricants (e.g., magnesium stearate, talc, silica, colloidal silicon dioxide, stearic acid, metallic stearates, hydrogenated vegetable oils, corn starch, polyethylene glycols, sodium benzoate, sodium acetate, etc.); disintegrants (e.g., starch, sodium starch glycolate, etc.); and wetting agents (e.g., sodium lauryl sulphate, etc).

[0228] Pharmaceutically acceptable organic or inorganic excipients suitable for non-parenteral administration which do not deleteriously react with nucleic acids can also be used to formulate the compositions of the present invention. Suitable pharmaceutically acceptable carriers include, but are not limited to, water, salt solutions, alcohols, polyethylene glycols, gelatin, lactose, amylose, magnesium stearate, talc, silicic acid, viscous paraffin, hydroxymethylcellulose, polyvinylpyrrolidone and the like.

[0229] Formulations for topical administration of nucleic acids may include sterile and non-sterile aqueous solutions, non-aqueous solutions in common solvents such as alcohols, or solutions of the nucleic acids in liquid or solid oil bases. The solutions may also contain buffers, diluents and other suitable additives. Pharmaceutically acceptable organic or inorganic excipients suitable for non-parenteral administration which do not deleteriously react with nucleic acids can be used.

[0230] Suitable pharmaceutically acceptable excipients include, but are not limited to, water, salt solutions, alcohol, polyethylene glycols, gelatin, lactose, amylose, magnesium stearate, talc, silicic acid, viscous paraffin, hydroxymethylcellulose, polyvinylpyrrolidone and the like.

[0231] Other Components

[0232] The compositions of the present invention may additionally contain other adjunct components conventionally found in pharmaceutical compositions, at their art-established usage levels. Thus, for example, the compositions may contain additional, compatible, pharmaceutically-active materials such as, for example, antipruritics, astringents, local anesthetics or anti-inflammatory agents, or may contain additional materials useful in physically formulating various dosage forms of the compositions of the present invention, such as dyes, flavoring agents, preservatives, antioxidants, opacifiers, thickening agents and stabilizers. However, such materials, when added, should not unduly interfere with the biological activities of the components of the compositions of the present invention. The formulations can be sterilized and, if desired, mixed with auxiliary agents, e.g., lubricants, preservatives, stabilizers, wetting agents, emulsifiers, salts for influencing osmotic pressure, buffers, colorings, flavorings and/or aromatic substances and the like which do not deleteriously interact with the nucleic acid(s) of the formulation.

[0233] Aqueous suspensions may contain substances which increase the viscosity of the suspension including, for example, sodium carboxymethylcellulose, sorbitol and/or dextran. The suspension may also contain stabilizers.

[0234] In some embodiments, pharmaceutical compositions featured in the invention include (a) one or more dsRNA compounds and (b) one or more anti-cytokine biologic agents which function by a non-RNAi mechanism. Examples of such biologics include, biologics that target IL1β (e.g., anakinra), IL6 (tocilizumab), or TNF (etanercept, infliximab, adlimumab, or certolizumab).

[0235] Toxicity and therapeutic efficacy of such compounds can be determined by standard pharmaceutical procedures in cell cultures or experimental animals, e.g., for determining the LD50 (the dose lethal to 50% of the population) and the ED50 (the dose therapeutically effective in 50% of the population). The dose ratio between toxic and therapeutic effects is the therapeutic index and it can be expressed as the ratio LD50/ED50. Compounds that exhibit high therapeutic indices are preferred.

[0236] The data obtained from cell culture assays and animal studies can be used in formulating a range of dosage for use in humans. The dosage of compositions featured in the invention lies generally within a range of circulating concentrations that include the ED50 with little or no toxicity. The dosage may vary within this range depending upon the dosage form employed and the route of administration utilized. For any compound used in the methods featured in the invention, the therapeutically effective dose can be estimated initially from cell culture assays. A dose may be formulated in animal models to achieve a circulating plasma concentration range of the compound or, when appropriate, of the polypeptide product of a target sequence (e.g., achieving a decreased concentration of the polypeptide) that includes the IC50 (i.e., the concentration of the test compound which achieves a half-maximal inhibition of symptoms) as determined in cell culture. Such information can be used to more accurately determine useful doses in humans. Levels in plasma may be measured, for example, by high performance liquid chromatography.

[0237] In addition to their administration, as discussed above, the dsRNAs featured in the invention can be administered in combination with other known agents effective in treatment of pathological processes mediated by TTR expression. In any event, the administering physician can adjust the amount and timing of dsRNA administration on the basis of results observed using standard measures of efficacy known in the art or described herein.

[0238] Methods for Treating Ocular Disease Caused by Expression of a TTR Gene

[0239] The invention relates in particular to the use of a dsRNA targeting TTR for the treatment of a TTR-related ocular amyloidosis. The invention features a method of treating, preventing or managing TTR-related ocular amyloidosis by administering to the patient in need of such treatment, prevention or management a therapeutically or prophylacticlaly effective amount of AD-18324 to the retina of the patient. In one embodiment, the method involves treating a human by identifying a human diagnosed as having TTR-related ocular amyloidosis or at risk for developing TTR-related ocular amyloidosis and administering to the human a therapeutically or prophylactically effective amount of AD-18324 to the retina of the human. The invention also includes the method of treating a human with TTR-related ocular amyloidosis by introducing into the retinal epithelium cell a dsRNA, wherein the dsRNA is AD-18324 or AD-18534; and maintaining the cell produced in the previous step for a time sufficient to obtain degradation of the mRNA transcript of a TTR gene, thereby inhibiting expression of the TTR gene in the cell. In some embodiments, TTR siRNA of the invention are used in methods of transthyretin (TTR)-related familial amyloidotic polyneuropathy (FAP) patients and treatment of ocular manifestations, such as vitreous opacity and glaucoma. It is know to one of skill in the art that amyloidogenic transthyretin (ATTR) synthesized by retinal pigment epithelium (RPE) plays important roles in the progression of ocular amyloidosis. Previous studies have shown that panretinal laser photocoagulation, which reduced the RPE cells, prevented the progression of amyloid deposition in the vitreous, indicating that the effective suppression of ATTR expression in RPE may become a novel therapy for ocular amyloidosis (see, e.g., Kawaji, T., et al., Ophthalmology. (2010) 117: 552-555). Administration of any of the TTR siRNA disclosed herein can be used for treatment of ocular manifestations of TTR related FAP, e.g., ocular amyloidosis. The dsRNA can be delivered in a manner to target a particular tissue, such as the eye. Modes of ocular delivery include retrobulbar, subcutaneous eyelid, subconjunctival, subtenon, anterior chamber or intravitreous injection (or internal injection or infusion). Specific formulations for ocular delivery include eye drops or ointments.

[0240] The dsRNA and an additional therapeutic agent can be administered in the same combination, e.g., parenterally, or the additional therapeutic agent can be administered as part of a separate composition or by another method described herein.

[0241] The invention features a method of administering a dsRNA targeting TTR to a patient having a disease or disorder mediated by TTR expression, such as a TTR amyloidosis, e.g., FAP. Administration of the dsRNA can stabilize and improve peripheral neurological function, for example, in a patient with FAP. Patients can be administered a therapeutic amount of dsRNA, such as 0.1 mg/kg, 0.2 mg/kg, 0.5 mg/kg, 1.0 mg/kg, 1.5 mg/kg, 2.0 mg/kg, or 2.5 mg/kg dsRNA. The dsRNA can be administered by intravenous infusion over a period of time, such as over a 5 minute, 10 minute, 15 minute, 20 minute, 25 minute, 60 minute, 120 minute or 180 minute period. The administration is repeated, for example, on a regular basis, such as biweekly (i.e., every two weeks) for one month, two months, three months, four months or longer. After an initial treatment regimen, the treatments can be administered on a less frequent basis. For example, after administration biweekly for three months, administration can be repeated once per month, for six months or a year or longer. Administration of the dsRNA can reduce TTR levels in the blood or urine of the patient by at least 20%, 25%, 30%, 40%, 50%, 60%, 70%, 80% or 90% or more.

[0242] Before administration of a full dose of the dsRNA, patients can be administered a smaller dose, such as a dose that is 5% of the full dose, and monitored for adverse effects, such as an allergic reaction or a change in liver function. For example, in patients monitored for changes in liver function, a low incidence of LFT (Liver Function Test) change (e.g., a 10-20% incidence of LFT) is acceptable (e.g., a reversible, 3-fold increase in ALT (alanine aminotransferase) and/or AST (aspartate aminotransferase) levels).

[0243] Many TTR-associated diseases and disorders are hereditary. Therefore, a patient in need of a TTR dsRNA can be identified by taking a family history. A healthcare provider, such as a doctor, nurse, or family member, can take a family history before prescribing or administering a TTR dsRNA. A DNA test may also be performed on the patient to identify a mutation in the TTR gene, before a TTR dsRNA is administered to the patient.

[0244] The patient may have a biopsy performed before receiving a TTR dsRNA. The biopsy can be, for example, on a tissue, such as the gastric mucosa, peripheral nerve, skin, abdominal fat, liver, or kidney, and the biopsy may reveal amyloid plaques, which are indicative of a TTR-mediated disorder. Upon the identification of amyloid plaques, the patient is administered a TTR dsRNA.

[0245] Methods for Inhibiting Expression of a TTR Gene

[0246] In yet another aspect, the invention provides a method for inhibiting the expression of a TTR gene in a mammal. The method includes administering a composition featured in the invention to the mammal such that expression of the target TTR gene is silenced.

[0247] When the organism to be treated is a mammal such as a human, the composition may be administered by any means known in the art including, but not limited to oral or parenteral routes, including intracranial (e.g., intraventricular, intraparenchymal and intrathecal), intravenous, intramuscular, subcutaneous, transdermal, airway (aerosol), nasal, rectal, and topical (including buccal and sublingual) administration. In certain embodiments, the compositions are administered by intravenous infusion or injection.

[0248] Unless otherwise defined, all technical and scientific terms used herein have the same meaning as commonly understood by one of ordinary skill in the art to which this invention belongs. Although methods and materials similar or equivalent to those described herein can be used in the practice or testing of the dsRNAs and methods featured in the invention, suitable methods and materials are described below. All publications, patent applications, patents, and other references mentioned herein are incorporated by reference in their entirety. In case of conflict, the present specification, including definitions, will control. In addition, the materials, methods, and examples are illustrative only and not intended to be limiting.

### EXAMPLES

### Example 1. dsRNA Synthesis

[0249] Source of Reagents

[0250] Where the source of a reagent is not specifically given herein, such reagent may be obtained from any supplier of reagents for molecular biology at a quality/purity standard for application in molecular biology.

[0251] siRNA Synthesis

[0252] Single-stranded RNAs were produced by solid phase synthesis on a scale of 1 μmole using an Expedite 8909 synthesizer (Applied Biosystems, Applera Deutschland GmbH, Darmstadt, Germany) and controlled pore glass (CPG, 500 Å, Proligo Biochemie GmbH, Hamburg, Germany) as solid support. RNA and RNA containing 2′-O-methyl nucleotides were generated by solid phase synthesis employing the corresponding phosphoramidites and 2′-O-methyl phosphoramidites, respectively (Proligo Biochemie GmbH, Hamburg, Germany). These building blocks were incorporated at selected sites within the sequence of the oligoribonucleotide chain using standard nucleoside phosphoramidite chemistry such as described in Current protocols in nucleic acid chemistry, Beaucage, S. L. et al. (Edrs.), John Wiley & Sons, Inc., New York, NY, USA. Phosphorothioate linkages were introduced by replacement of the iodine oxidizer solution with a solution of the Beaucage reagent (Chruachem Ltd, Glasgow, UK) in acetonitrile (1%). Further ancillary reagents were obtained from Mallinckrodt Baker (Griesheim, Germany).

[0253] Deprotection and purification of the crude oligoribonucleotides by anion exchange HPLC were carried out according to established procedures. Yields and concentrations were determined by UV absorption of a solution of the respective RNA at a wavelength of 260 nm using a spectral photometer (DU 640B, Beckman Coulter GmbH, Unterschleißheim, Germany). Double stranded RNA was generated by mixing an equimolar solution of complementary strands in annealing buffer (20 mM sodium phosphate, pH 6.8; 100 mM sodium chloride), heated in a water bath at 85-90° C. for 3 minutes and cooled to room temperature over a period of 3-4 hours. The annealed RNA solution was stored at −20° C. until use.

[0254] For the synthesis of 3′-cholesterol-conjugated siRNAs (herein referred to as -Chol-3′), an appropriately modified solid support was used for RNA synthesis. The modified solid support was prepared as follows:

### Diethyl-2-azabutane-1,4-dicarboxylate AA

[chemical structure]

[0256] A 4.7 M aqueous solution of sodium hydroxide (50 mL) was added into a stirred, ice-cooled solution of ethyl glycinate hydrochloride (32.19 g, 0.23 mole) in water (50 mL). Then, ethyl acrylate (23.1 g, 0.23 mole) was added and the mixture was stirred at room temperature until completion of the reaction was ascertained by TLC. After 19 h the solution was partitioned with dichloromethane (3×100 mL). The organic layer was dried with anhydrous sodium sulfate, filtered and evaporated. The residue was distilled to afford AA (28.8 g, 61%).

### 3-{Ethoxycarbonylmethyl-[6-(9H-fluoren-9-ylmethoxycarbonyl-amino)-hexanoyl]-amino}-propionic Acid Ethyl Ester AB

[chemical structure]

[0258] Fmoc-6-amino-hexanoic acid (9.12 g, 25.83 mmol) was dissolved in dichloromethane (50 mL) and cooled with ice. Diisopropylcarbodiimde (3.25 g, 3.99 mL, 25.83 mmol) was added to the solution at 0° C. It was then followed by the addition of Diethyl-azabutane-1,4-dicarboxylate (5 g, 24.6 mmol) and dimethylamino pyridine (0.305 g, 2.5 mmol). The solution was brought to room temperature and stirred further for 6 h. Completion of the reaction was ascertained by TLC. The reaction mixture was concentrated under vacuum and ethyl acetate was added to precipitate diisopropyl urea. The suspension was filtered. The filtrate was washed with 5% aqueous hydrochloric acid, 5% sodium bicarbonate and water. The combined organic layer was dried over sodium sulfate and concentrated to give the crude product which was purified by column chromatography (50% EtOAC/Hexanes) to yield 11.87 g (88%) of AB.

### 3-[(6-Amino-hexanoyl)-ethoxycarbonylmethyl-amino]-propionic Acid Ethyl Ester AC

[chemical structure]

[0260] 3-{Ethoxycarbonylmethyl-[6-(9H-fluoren-9-ylmethoxycarbonylamino)-hexanoyl]-amino}-propionic acid ethyl ester AB (11.5 g, 21.3 mmol) was dissolved in 20% piperidine in dimethylformamide at 0° C. The solution was continued stirring for 1 h. The reaction mixture was concentrated under vacuum, water was added to the residue, and the product was extracted with ethyl acetate. The crude product was purified by conversion into its hydrochloride salt.

### 3-{6-[17-(1,5-Dimethyl-hexyl)-10,13-dimethyl-2,3,4,7,8,9,10,11,12,13,14,15,16,17-tetradecahydro-1H-cyclopentaMphenanthren-3-yloxycarbonylamino]-hexanoyl}ethoxycarbonylmethyl-amino)-propionic Acid Ethyl Ester AD

[chemical structure]

[0262] The hydrochloride salt of 3-[(6-Amino-hexanoyl)-ethoxycarbonylmethyl-amino]-propionic acid ethyl ester AC (4.7 g, 14.8 mmol) was taken up in dichloromethane. The suspension was cooled to 0° C. on ice. To the suspension diisopropylethylamine (3.87 g, 5.2 mL, mmol) was added. To the resulting solution cholesteryl chloroformate (6.675 g, 14.8 mmol) was added. The reaction mixture was stirred overnight. The reaction mixture was diluted with dichloromethane and washed with 10% hydrochloric acid. The product was purified by flash chromatography (10.3 g, 92%).

### 1-{6-[17-(1,5-Dimethyl-hexyl)-10,13-dimethyl-2,3,4,7,8,9,10,11,12,13,14,15,16,17-tetradecahydro-1H-cyclopenta[a] phenanthren-3-yloxycarbonylamino]-hexanoyl}-4-oxo-pyrrolidine-3-carboxylic Acid Ethyl Ester AE

[chemical structure]

[0264] Potassium t-butoxide (1.1 g, 9.8 mmol) was slurried in 30 mL of dry toluene. The mixture was cooled to 0° C. on ice and 5 g (6.6 mmol) of diester AD was added slowly with stirring within 20 mins. The temperature was kept below 5° C. during the addition. The stirring was continued for 30 mins at 0° C. and 1 mL of glacial acetic acid was added, immediately followed by 4 g of NaH₂PO₄·H₂O in 40 mL of water The resultant mixture was extracted twice with 100 mL of dichloromethane each and the combined organic extracts were washed twice with 10 mL of phosphate buffer each, dried, and evaporated to dryness. The residue was dissolved in 60 mL of toluene, cooled to 0° C. and extracted with three 50 mL portions of cold pH 9.5 carbonate buffer. The aqueous extracts were adjusted to pH 3 with phosphoric acid, and extracted with five 40 mL portions of chloroform which were combined, dried and evaporated to dryness. The residue was purified by column chromatography using 25% ethylacetate/hexane to afford 1.9 g of b-ketoester (39%).

### [6-(3-Hydroxy-4-hydroxymethyl-pyrrolidin-1-yl)-6-oxo-hexyl]-carbamic acid 17-(1,5-dimethyl-hexyl)-10,13-dimethyl-2,3,4,7,8,9,10,11,12,13,14,15,16,17-tetradecahydro-1H-cyclopenta[a]phenanthren-3-yl ester AF

[chemical structure]

[0266] Methanol (2 mL) was added dropwise over a period of 1 h to a refluxing mixture of b-ketoester AE (1.5 g, 2.2 mmol) and sodium borohydride (0.226 g, 6 mmol) in tetrahydrofuran (10 mL). Stirring was continued at reflux temperature for 1 h. After cooling to room temperature, 1 N HCl (12.5 mL) was added, the mixture was extracted with ethylacetate (3×40 mL). The combined ethylacetate layer was dried over anhydrous sodium sulfate and concentrated under vacuum to yield the product which was purified by column chromatography (10% MeOH/CHCl₃) (89%).

### (6-{3-[Bis-(4-methoxy-phenyl)-phenyl-methoxymethyl]-4-hydroxy-pyrrolidin-1-yl}-6-oxo-hexyl)-carbamic acid 17-(1,5-dimethyl-hexyl)-10,13-dimethyl-2,3,4,7,8,9,10,11,12,13,14,15,16,17-tetradecahydro-1H-cyclopenta[a]phenanthren-3-yl Ester AG

[chemical structure]

[0268] Diol AF (1.25 gm 1.994 mmol) was dried by evaporating with pyridine (2×5 mL) in vacuo. Anhydrous pyridine (10 mL) and 4,4′-dimethoxytritylchloride (0.724 g, 2.13 mmol) were added with stifling. The reaction was carried out at room temperature overnight. The reaction was quenched by the addition of methanol. The reaction mixture was concentrated under vacuum and to the residue dichloromethane (50 mL) was added. The organic layer was washed with 1M aqueous sodium bicarbonate. The organic layer was dried over anhydrous sodium sulfate, filtered and concentrated. The residual pyridine was removed by evaporating with toluene. The crude product was purified by column chromatography (2% MeOH/Chloroform, Rf=0.5 in 5% MeOH/CHCl3) (1.75 g, 95%).

### Succinic acid mono-(4-[bis-(4-methoxy-phenyl)-phenyl-methoxymethyl]-1-{6-[17-(1,5-dimethyl-hexyl)-10,13-dimethyl 2,3,4,7,8,9,10,11,12,13,14,15,16,17-tetradecahydro-1H cyclopenta[a]phenanthren-3-yloxycarbonylamino]-hexanoyl}-pyrrolidin-3-yl) ester AH

[chemical structure]

[0270] Compound AG (1.0 g, 1.05 mmol) was mixed with succinic anhydride (0.150 g, 1.5 mmol) and DMAP (0.073 g, 0.6 mmol) and dried in a vacuum at 40° C. overnight. The mixture was dissolved in anhydrous dichloroethane (3 mL), triethylamine (0.318 g, 0.440 mL, 3.15 mmol) was added and the solution was stirred at room temperature under argon atmosphere for 16 h. It was then diluted with dichloromethane (40 mL) and washed with ice cold aqueous citric acid (5 wt %, 30 mL) and water (2×20 mL). The organic phase was dried over anhydrous sodium sulfate and concentrated to dryness. The residue was used as such for the next step.

[0271] Cholesterol Derivatised CPG AI

[chemical structure]

[0272] Succinate AH (0.254 g, 0.242 mmol) was dissolved in a mixture of dichloromethane/acetonitrile (3:2, 3 mL). To that solution DMAP (0.0296 g, 0.242 mmol) in acetonitrile (1.25 mL), 2,2′-Dithio-bis(5-nitropyridine) (0.075 g, 0.242 mmol) in acetonitrile/dichloroethane (3:1, 1.25 mL) were added successively. To the resulting solution triphenylphosphine (0.064 g, 0.242 mmol) in acetonitrile (0.6 ml) was added. The reaction mixture turned bright orange in color. The solution was agitated briefly using a wrist-action shaker (5 mins). Long chain alkyl amine-CPG (LCAA-CPG) (1.5 g, 61 mM) was added. The suspension was agitated for 2 h. The CPG was filtered through a sintered funnel and washed with acetonitrile, dichloromethane and ether successively. Unreacted amino groups were masked using acetic anhydride/pyridine. The achieved loading of the CPG was measured by taking UV measurement (37 mM/g).

[0273] The synthesis of siRNAs bearing a 5′-12-dodecanoic acid bisdecylamide group (herein referred to as “5′-C32-”) or a 5′-cholesteryl derivative group (herein referred to as “5′-Chol-”) was performed as described in WO 2004/065601, except that, for the cholesteryl derivative, the oxidation step was performed using the Beaucage reagent in order to introduce a phosphorothioate linkage at the 5′-end of the nucleic acid oligomer.

[0274] Nucleic acid sequences are represented below using standard nomenclature, and specifically the abbreviations of Table 1.

TABLE 1
Abbreviations
Abbreviations of nucleotide monomers used in nucleic acid
sequence representation. It will be understood that these
monomers, when present in an oligonucleotide, are
mutually linked by 5′-3′-phosphodiester bonds.

| Abbreviation | Nucleotide(s) |
|---|---|
| A | adenosine-3′-phosphate |
| C | cytidine-3′-phosphate |
| G | guanosine-3′-phosphate |
| U | uridine-3′-phosphate |
| N | any nucleotide (G, A, C, U, dT, T) |
| a | 2′-O-methyladenosine-3′-phosphate |
| c | 2′-O-methylcytidine-3′-phosphate |
| g | 2′-O-methylguanosine-3′-phosphate |
| u | 2′-O-methyluridine-3′-phosphate |
| T, dT | 2′-deoxythymidine-3′-phosphate |
| sT; sdT | 2′-deoxy-thymidine-5′phosphate- |
| | phosphorothioate |

[0275] Conjugated siRNAs

[0276] Preparation of siRNAs conjugated to a ligand such as cholesterol and vitamin E are shown in scheme 1 (FIG. 28) and scheme 2 (FIG. 29).

### Example 2 Å. TTR siRNA Design

[0277] Transcripts

[0278] siRNA design was carried out to identify siRNAs targeting the gene transthyretin from human (symbol TTR) and rat (symbol Ttr). The design used the TTR transcripts NM_000371.2 (SEQ ID NO:1329) (human) and NM_012681.1 (SEQ ID NO:1330) (rat) from the NCBI Refseq collection. The siRNA duplexes were designed with 100% identity to their respective TTR genes.

[0279] siRNA Design and Specificity Prediction

[0280] The predicted specificity of all possible 19 mers was determined for each sequence. The TTR siRNAs were used in a comprehensive search against the human and rat transcriptomes (defined as the set of NM_ and XM_records within the NCBI Refseq set) using the FASTA algorithm. The Python script ‘offtargetFasta.py’ was then used to parse the alignments and generate a score based on the position and number of mismatches between the siRNA and any potential ‘off-target’ transcript. The off-target score is weighted to emphasize differences in the ‘seed’ region of siRNAs, in positions 2-9 from the 5′ end of the molecule. The off-target score is calculated as follows: mismatches between the oligo and the transcript are given penalties. A mismatch in the seed region in positions 2-9 of the oligo is given a penalty of 2.8; mismatches in the putative cleavage sites 10 and 11 are given a penalty of 1.2, and mismatches in positions 12-19 a penalty of 1. Mismatches in position 1 are not considered. The off-target score for each oligo-transcript pair is then calculated by summing the mismatch penalties. The lowest off-target score from all the oligo-transcript pairs is then determined and used in subsequent sorting of oligos. Both siRNA strands were assigned to a category of specificity according to the calculated scores: a score above 3 qualifies as highly specific, equal to 3 as specific, and between 2.2 and 2.8 as moderately specific. In picking which oligos to synthesize, off-target scores of the antisense strand were sorted from high to low, and the 144 best (lowest off-target score) oligo pairs from human, and the best 26 pairs from rat were selected.

[0281] siRNA Sequence Selection

[0282] A total of 140 sense and 140 antisense human TTR derived siRNA oligos were synthesized and formed into duplexes. A total of 26 sense and 26 antisense rat TTR derived siRNA oligos were synthesized and formed into duplexes. Duplexes are presented in Tables 2-4 (human TTR) and Tables 5-7 (rat TTR).

TABLE 2
Identification numbers for human TTR dsRNAs
See Table 4 for sequences and modifications of oligos.

| Duplex # | Sense Oligo # | Antisense Oligo # |
|---|---|---|
| AD-18243 | A-32153 | A-32154 |
| AD-18244 | A-32155 | A-32156 |
| AD-18245 | A-32157 | A-32158 |
| AD-18246 | A-32159 | A-32160 |
| AD-18247 | A-32163 | A-32164 |
| AD-18248 | A-32165 | A-32166 |
| AD-18249 | A-32167 | A-32168 |
| AD-18250 | A-32169 | A-32170 |
| AD-18251 | A-32171 | A-32172 |
| AD-18252 | A-32175 | A-32176 |
| AD-18253 | A-32177 | A-32178 |
| AD-18254 | A-32179 | A-32180 |
| AD-18255 | A-32181 | A-32182 |
| AD-18256 | A-32183 | A-32184 |
| AD-18257 | A-32187 | A-32188 |
| AD-18258 | A-32189 | A-32190 |
| AD-18259 | A-32191 | A-32192 |
| AD-18260 | A-32193 | A-32194 |
| AD-18261 | A-32195 | A-32196 |
| AD-18262 | A-32199 | A-32200 |
| AD-18263 | A-32201 | A-32202 |
| AD-18264 | A-32203 | A-32204 |
| AD-18265 | A-32205 | A-32206 |
| AD-18266 | A-32207 | A-32208 |
| AD-18267 | A-32211 | A-32212 |
| AD-18268 | A-32213 | A-32214 |
| AD-18269 | A-32215 | A-32216 |
| AD-18270 | A-32217 | A-32218 |
| AD-18271 | A-32219 | A-32220 |
| AD-18272 | A-32221 | A-32222 |
| AD-18273 | A-32223 | A-32224 |
| AD-18274 | A-32225 | A-32226 |
| AD-18275 | A-32227 | A-32228 |
| AD-18276 | A-32229 | A-32230 |
| AD-18277 | A-32231 | A-32232 |
| AD-18278 | A-32233 | A-32234 |
| AD-18279 | A-32235 | A-32236 |
| AD-18280 | A-32237 | A-32238 |
| AD-18281 | A-32239 | A-32240 |
| AD-18282 | A-32241 | A-32242 |
| AD-18283 | A-32243 | A-32244 |
| AD-18284 | A-32247 | A-32248 |
| AD-18285 | A-32249 | A-32250 |
| AD-18286 | A-32251 | A-32252 |
| AD-18287 | A-32253 | A-32254 |
| AD-18288 | A-32255 | A-32256 |
| AD-18289 | A-32259 | A-32260 |
| AD-18290 | A-32261 | A-32262 |
| AD-18291 | A-32263 | A-32264 |
| AD-18292 | A-32265 | A-32266 |
| AD-18293 | A-32267 | A-32268 |
| AD-18294 | A-32269 | A-32270 |
| AD-18295 | A-32271 | A-32272 |
| AD-18296 | A-32273 | A-32274 |
| AD-18297 | A-32275 | A-32276 |
| AD-18298 | A-32277 | A-32278 |
| AD-18299 | A-32279 | A-32280 |
| AD-18300 | A-32281 | A-32282 |
| AD-18301 | A-32283 | A-32284 |
| AD-18302 | A-32285 | A-32286 |
| AD-18303 | A-32287 | A-32288 |
| AD-18304 | A-32289 | A-32290 |
| AD-18305 | A-32291 | A-32292 |
| AD-18306 | A-32295 | A-32296 |
| AD-18307 | A-32297 | A-32298 |
| AD-18308 | A-32299 | A-32300 |
| AD-18309 | A-32301 | A-32302 |
| AD-18310 | A-32303 | A-32304 |
| AD-18311 | A-32307 | A-32308 |
| AD-18312 | A-32309 | A-32310 |
| AD-18313 | A-32311 | A-32312 |
| AD-18314 | A-32313 | A-32314 |
| AD-18315 | A-32315 | A-32316 |
| AD-18316 | A-32319 | A-32320 |
| AD-18317 | A-32321 | A-32322 |
| AD-18318 | A-32323 | A-32324 |
| AD-18319 | A-32325 | A-32326 |
| AD-18320 | A-32327 | A-32328 |
| AD-18321 | A-32331 | A-32332 |
| AD-18322 | A-32333 | A-32334 |
| AD-18323 | A-32335 | A-32336 |
| AD-18324 | A-32337 | A-32338 |
| AD-18325 | A-32339 | A-32340 |
| AD-18326 | A-32341 | A-32342 |
| AD-18327 | A-32343 | A-32344 |
| AD-18328 | A-32345 | A-32346 |
| AD-18329 | A-32347 | A-32348 |
| AD-18330 | A-32349 | A-32350 |
| AD-18331 | A-32351 | A-32352 |
| AD-18332 | A-32353 | A-32354 |
| AD-18333 | A-32355 | A-32356 |
| AD-18334 | A-32357 | A-32358 |
| AD-18335 | A-32359 | A-32360 |
| AD-18336 | A-32363 | A-32364 |
| AD-18337 | A-32367 | A-32368 |
| AD-18338 | A-32369 | A-32370 |
| AD-18339 | A-32371 | A-32372 |
| AD-18340 | A-32373 | A-32374 |
| AD-18341 | A-32375 | A-32376 |
| AD-18342 | A-32379 | A-32380 |
| AD-18343 | A-32381 | A-32382 |
| AD-18344 | A-32383 | A-32384 |
| AD-18345 | A-32385 | A-32386 |
| AD-18346 | A-32387 | A-32388 |
| AD-18347 | A-32391 | A-32392 |
| AD-18348 | A-32393 | A-32394 |
| AD-18349 | A-32395 | A-32396 |
| AD-18350 | A-32397 | A-32398 |
| AD-18351 | A-32399 | A-32400 |
| AD-18352 | A-32401 | A-32402 |
| AD-18353 | A-32403 | A-32404 |
| AD-18354 | A-32405 | A-32406 |
| AD-18355 | A-32407 | A-32408 |
| AD-18356 | A-32409 | A-32410 |
| AD-18357 | A-32411 | A-32412 |
| AD-18358 | A-32415 | A-32416 |
| AD-18359 | A-32417 | A-32418 |
| AD-18360 | A-32419 | A-32420 |
| AD-18361 | A-32421 | A-32422 |
| AD-18362 | A-32423 | A-32424 |
| AD-18363 | A-32427 | A-32428 |
| AD-18364 | A-32429 | A-32430 |
| AD-18446 | A-32161 | A-32162 |
| AD-18447 | A-32173 | A-32174 |
| AD-18448 | A-32185 | A-32186 |
| AD-18449 | A-32197 | A-32198 |
| AD-18450 | A-32209 | A-32210 |
| AD-18451 | A-32245 | A-32246 |
| AD-18452 | A-32257 | A-32258 |
| AD-18453 | A-32293 | A-32294 |
| AD-18454 | A-32305 | A-32306 |
| AD-18455 | A-32317 | A-32318 |
| AD-18456 | A-32329 | A-32330 |
| AD-18457 | A-32361 | A-32362 |
| AD-18458 | A-32365 | A-32366 |
| AD-18459 | A-32377 | A-32378 |
| AD-18460 | A-32389 | A-32390 |
| AD-18461 | A-32401 | A-32402 |
| AD-18462 | A-32413 | A-32414 |
| AD-18463 | A-32425 | A-32426 |

TABLE 3A
Sense and antisense strand sequences of human TTR dsRNAs

| | | | SEQ | Sequence with 3′ | SEQ |
|---|---|---|---|---|---|
| | | Sequence | ID | dinucleotide overhang | ID |
| Strand | Position | (5′ to 3′) | NO: | (5′ to 3′) | NO: |
| S | 100 | CCGGUGAAUCCAAGUGUCC | 1 | CCGGUGAAUCCAAGUGUCCNN | 281 |
| as | 118 | GGACACUUGGAUUCACCGG | 2 | GGACACUUGGAUUCACCGGNN | 282 |
| S | 11 | ACUCAUUCUUGGCAGGAUG | 3 | ACUCAUUCUUGGCAGGAUGNN | 283 |
| as | 29 | CAUCCUGCCAAGAAUGAGU | 4 | CAUCCUGCCAAGAAUGAGUNN | 284 |
| S | 111 | AAGUGUCCUCUGAUGGUCA | 5 | AAGUGUCCUCUGAUGGUCANN | 285 |
| as | 129 | UGACCAUCAGAGGACACUU | 6 | UGACCAUCAGAGGACACUUNN | 286 |
| S | 13 | UCAUUCUUGGCAGGAUGGC | 7 | UCAUUCUUGGCAGGAUGGCNN | 287 |
| as | 31 | GCCAUCCUGCCAAGAAUGA | 8 | GCCAUCCUGCCAAGAAUGANN | 288 |
| s | 130 | AAGUUCUAGAUGCUGUCCG | 9 | AAGUUCUAGAUGCUGUCCGNN | 289 |
| as | 148 | CGGACAGCAUCUAGAACUU | 10 | CGGACAGCAUCUAGAACUUNN | 290 |
| s | 132 | GUUCUAGAUGCUGUCCGAG | 11 | GUUCUAGAUGCUGUCCGAGNN | 291 |
| as | 150 | CUCGGACAGCAUCUAGAAC | 12 | CUCGGACAGCAUCUAGAACNN | 292 |
| s | 135 | CUAGAUGCUGUCCGAGGCA | 13 | CUAGAUGCUGUCCGAGGCANN | 293 |
| as | 153 | UGCCUCGGACAGCAUCUAG | 14 | UGCCUCGGACAGCAUCUAGNN | 294 |
| s | 138 | GAUGCUGUCCGAGGCAGUC | 15 | GAUGCUGUCCGAGGCAGUCNN | 295 |
| as | 156 | GACUGCCUCGGACAGCAUC | 16 | GACUGCCUCGGACAGCAUCNN | 296 |
| s | 14 | CAUUCUUGGCAGGAUGGCU | 17 | CAUUCUUGGCAGGAUGGCUNN | 297 |
| as | 32 | AGCCAUCCUGCCAAGAAUG | 18 | AGCCAUCCUGCCAAGAAUGNN | 298 |
| s | 140 | UGCUGUCCGAGGCAGUCCU | 19 | UGCUGUCCGAGGCAGUCCUNN | 299 |
| as | 158 | AGGACUGCCUCGGACAGCA | 20 | AGGACUGCCUCGGACAGCANN | 300 |
| s | 146 | CCGAGGCAGUCCUGCCAUC | 21 | CCGAGGCAGUCCUGCCAUCNN | 301 |
| as | 164 | GAUGGCAGGACUGCCUCGG | 22 | GAUGGCAGGACUGCCUCGGNN | 302 |
| s | 152 | CAGUCCUGCCAUCAAUGUG | 23 | CAGUCCUGCCAUCAAUGUGNN | 303 |
| as | 170 | CACAUUGAUGGCAGGACUG | 24 | CACAUUGAUGGCAGGACUGNN | 304 |
| s | 164 | CAAUGUGGCCGUGCAUGUG | 25 | CAAUGUGGCCGUGCAUGUGNN | 305 |
| as | 182 | CACAUGCACGGCCACAUUG | 26 | CACAUGCACGGCCACAUUGNN | 306 |
| s | 178 | AUGUGUUCAGAAAGGCUGC | 27 | AUGUGUUCAGAAAGGCUGCNN | 307 |
| as | 196 | GCAGCCUUUCUGAACACAU | 28 | GCAGCCUUUCUGAACACAUNN | 308 |
| s | 2 | CAGAAGUCCACUCAUUCUU | 29 | CAGAAGUCCACUCAUUCUUNN | 309 |
| as | 20 | AAGAAUGAGUGGACUUCUG | 30 | AAGAAUGAGUGGACUUCUGNN | 310 |
| s | 21 | GGCAGGAUGGCUUCUCAUC | 31 | GGCAGGAUGGCUUCUCAUCNN | 311 |
| as | 39 | GAUGAGAAGCCAUCCUGCC | 32 | GAUGAGAAGCCAUCCUGCCNN | 312 |
| s | 210 | GAGCCAUUUGCCUCUGGGA | 33 | GAGCCAUUUGCCUCUGGGANN | 313 |
| as | 228 | UCCCAGAGGCAAAUGGCUC | 34 | UCCCAGAGGCAAAUGGCUCNN | 314 |
| s | 23 | CAGGAUGGCUUCUCAUCGU | 35 | CAGGAUGGCUUCUCAUCGUNN | 315 |
| as | 41 | ACGAUGAGAAGCCAUCCUG | 36 | ACGAUGAGAAGCCAUCCUGNN | 316 |
| s | 24 | AGGAUGGCUUCUCAUCGUC | 37 | AGGAUGGCUUCUCAUCGUCNN | 317 |
| as | 42 | GACGAUGAGAAGCCAUCCU | 38 | GACGAUGAGAAGCCAUCCUNN | 318 |
| s | 245 | AGAGCUGCAUGGGCUCACA | 39 | AGAGCUGCAUGGGCUCACANN | 319 |
| as | 263 | UGUGAGCCCAUGCAGCUCU | 40 | UGUGAGCCCAUGCAGCUCUNN | 320 |
| s | 248 | GCUGCAUGGGCUCACAACU | 41 | GCUGCAUGGGCUCACAACUNN | 321 |
| as | 266 | AGUUGUGAGCCCAUGCAGC | 42 | AGUUGUGAGCCCAUGCAGCNN | 322 |
| s | 25 | GGAUGGCUUCUCAUCGUCU | 43 | GGAUGGCUUCUCAUCGUCUNN | 323 |
| as | 43 | AGACGAUGAGAAGCCAUCC | 44 | AGACGAUGAGAAGCCAUCCNN | 324 |
| s | 251 | GCAUGGGCUCACAACUGAG | 45 | GCAUGGGCUCACAACUGAGNN | 325 |
| as | 269 | CUCAGUUGUGAGCCCAUGC | 46 | CUCAGUUGUGAGCCCAUGCNN | 326 |
| s | 253 | AUGGGCUCACAACUGAGGA | 47 | AUGGGCUCACAACUGAGGANN | 327 |
| as | 271 | UCCUCAGUUGUGAGCCCAU | 48 | UCCUCAGUUGUGAGCCCAUNN | 328 |
| s | 254 | UGGGCUCACAACUGAGGAG | 49 | UGGGCUCACAACUGAGGAGNN | 329 |
| as | 272 | CUCCUCAGUUGUGAGCCCA | 50 | CUCCUCAGUUGUGAGCCCANN | 330 |
| s | 270 | GAGGAAUUUGUAGAAGGGA | 51 | GAGGAAUUUGUAGAAGGGANN | 331 |
| as | 288 | UCCCUUCUACAAAUUCCUC | 52 | UCCCUUCUACAAAUUCCUCNN | 332 |
| s | 276 | UUUGUAGAAGGGAUAUACA | 53 | UUUGUAGAAGGGAUAUACANN | 333 |
| as | 294 | UGUAUAUCCCUUCUACAAA | 54 | UGUAUAUCCCUUCUACAAANN | 334 |
| s | 277 | UUGUAGAAGGGAUAUACAA | 55 | UUGUAGAAGGGAUAUACAANN | 335 |
| as | 295 | UUGUAUAUCCCUUCUACAA | 56 | UUGUAUAUCCCUUCUACAANN | 336 |
| s | 278 | UGUAGAAGGGAUAUACAAA | 57 | UGUAGAAGGGAUAUACAAANN | 337 |
| as | 296 | UUUGUAUAUCCCUUCUACA | 58 | UUUGUAUAUCCCUUCUACANN | 338 |
| s | 281 | AGAAGGGAUAUACAAAGUG | 59 | AGAAGGGAUAUACAAAGUGNN | 339 |
| as | 299 | CACUUUGUAUAUCCCUUCU | 60 | CACUUUGUAUAUCCCUUCUNN | 340 |
| s | 295 | AAGUGGAAAUAGACACCAA | 61 | AAGUGGAAAUAGACACCAANN | 341 |
| as | 313 | UUGGUGUCUAUUUCCACUU | 62 | UUGGUGUCUAUUUCCACUUNN | 342 |
| s | 299 | GGAAAUAGACACCAAAUCU | 63 | GGAAAUAGACACCAAAUCUNN | 343 |
| as | 317 | AGAUUUGGUGUCUAUUUCC | 64 | AGAUUUGGUGUCUAUUUCCNN | 344 |
| s | 300 | GAAAUAGACACCAAAUCUU | 65 | GAAAUAGACACCAAAUCUUNN | 345 |
| as | 318 | AAGAUUUGGUGUCUAUUUC | 66 | AAGAUUUGGUGUCUAUUUCNN | 346 |
| s | 303 | AUAGACACCAAAUCUUACU | 67 | AUAGACACCAAAUCUUACUNN | 347 |
| as | 321 | AGUAAGAUUUGGUGUCUAU | 68 | AGUAAGAUUUGGUGUCUAUNN | 348 |
| s | 304 | UAGACACCAAAUCUUACUG | 69 | UAGACACCAAAUCUUACUGNN | 349 |
| as | 322 | CAGUAAGAUUUGGUGUCUA | 70 | CAGUAAGAUUUGGUGUCUANN | 350 |
| s | 305 | AGACACCAAAUCUUACUGG | 71 | AGACACCAAAUCUUACUGGNN | 351 |
| as | 323 | CCAGUAAGAUUUGGUGUCU | 72 | CCAGUAAGAUUUGGUGUCUNN | 352 |
| s | 317 | UUACUGGAAGGCACUUGGC | 73 | UUACUGGAAGGCACUUGGCNN | 353 |
| as | 335 | GCCAAGUGCCUUCCAGUAA | 74 | GCCAAGUGCCUUCCAGUAANN | 354 |
| s | 32 | UUCUCAUCGUCUGCUCCUC | 75 | UUCUCAUCGUCUGCUCCUCNN | 355 |
| as | 50 | GAGGAGCAGACGAUGAGAA | 76 | GAGGAGCAGACGAUGAGAANN | 356 |
| s | 322 | GGAAGGCACUUGGCAUCUC | 77 | GGAAGGCACUUGGCAUCUCNN | 357 |
| as | 340 | GAGAUGCCAAGUGCCUUCC | 78 | GAGAUGCCAAGUGCCUUCCNN | 358 |
| s | 326 | GGCACUUGGCAUCUCCCCA | 79 | GGCACUUGGCAUCUCCCCANN | 359 |
| as | 344 | UGGGGAGAUGCCAAGUGCC | 80 | UGGGGAGAUGCCAAGUGCCNN | 360 |
| s | 333 | GGCAUCUCCCCAUUCCAUG | 81 | GGCAUCUCCCCAUUCCAUGNN | 361 |
| as | 351 | AUGGAAUGGGGAGAUGCCTT | 82 | AUGGAAUGGGGAGAUGCCTTNN | 362 |
| s | 334 | GCAUCUCCCCAUUCCAUGA | 83 | GCAUCUCCCCAUUCCAUGANN | 363 |
| as | 352 | UCAUGGAAUGGGGAGAUGC | 84 | UCAUGGAAUGGGGAGAUGCNN | 364 |
| s | 335 | CAUCUCCCCAUUCCAUGAG | 85 | CAUCUCCCCAUUCCAUGAGNN | 365 |
| as | 353 | CUCAUGGAAUGGGGAGAUG | 86 | CUCAUGGAAUGGGGAGAUGNN | 366 |
| s | 336 | AUCUCCCCAUUCCAUGAGC | 87 | AUCUCCCCAUUCCAUGAGCNN | 367 |
| as | 354 | GCUCAUGGAAUGGGGAGAU | 88 | GCUCAUGGAAUGGGGAGAUNN | 368 |
| s | 338 | CUCCCCAUUCCAUGAGCAU | 89 | CUCCCCAUUCCAUGAGCAUNN | 369 |
| as | 356 | AUGCUCAUGGAAUGGGGAG | 90 | AUGCUCAUGGAAUGGGGAGNN | 370 |
| s | 341 | CCCAUUCCAUGAGCAUGCA | 91 | CCCAUUCCAUGAGCAUGCANN | 371 |
| as | 359 | UGCAUGCUCAUGGAAUGGG | 92 | UGCAUGCUCAUGGAAUGGGNN | 372 |
| s | 347 | CCAUGAGCAUGCAGAGGUG | 93 | CCAUGAGCAUGCAGAGGUGNN | 373 |
| as | 365 | CACCUCUGCAUGCUCAUGG | 94 | CACCUCUGCAUGCUCAUGGNN | 374 |
| s | 352 | AGCAUGCAGAGGUGGUAUU | 95 | AGCAUGCAGAGGUGGUAUUNN | 375 |
| as | 370 | AAUACCACCUCUGCAUGCU | 96 | AAUACCACCUCUGCAUGCUNN | 376 |
| s | 354 | CAUGCAGAGGUGGUAUUCA | 97 | CAUGCAGAGGUGGUAUUCANN | 377 |
| as | 372 | UGAAUACCACCUCUGCAUG | 98 | UGAAUACCACCUCUGCAUGNN | 378 |
| s | 355 | AUGCAGAGGUGGUAUUCAC | 99 | AUGCAGAGGUGGUAUUCACNN | 379 |
| as | 373 | GUGAAUACCACCUCUGCAU | 100 | GUGAAUACCACCUCUGCAUNN | 380 |
| s | 362 | GGUGGUAUUCACAGCCAAC | 101 | GGUGGUAUUCACAGCCAACNN | 381 |
| as | 380 | GUUGGCUGUGAAUACCACC | 102 | GUUGGCUGUGAAUACCACCNN | 382 |
| s | 363 | GUGGUAUUCACAGCCAACG | 103 | GUGGUAUUCACAGCCAACGNN | 383 |
| as | 381 | CGUUGGCUGUGAAUACCAC | 104 | CGUUGGCUGUGAAUACCACNN | 384 |
| s | 364 | UGGUAUUCACAGCCAACGA | 105 | UGGUAUUCACAGCCAACGANN | 385 |
| as | 382 | UCGUUGGCUGUGAAUACCA | 106 | UCGUUGGCUGUGAAUACCANN | 386 |
| s | 365 | GGUAUUCACAGCCAACGAC | 107 | GGUADUCACAGCCAACGACNN | 387 |
| as | 383 | GUCGUUGGCUGUGAAUACC | 108 | GUCGUUGGCUGUGAAUACCNN | 388 |
| s | 366 | GUAUUCACAGCCAACGACU | 109 | GUAUUCACAGCCAACGACUNN | 389 |
| as | 384 | AGUCGUUGGCUGUGAAUAC | 110 | AGUCGUUGGCUGUGAAUACNN | 390 |
| s | 367 | UAUUCACAGCCAACGACUC | 111 | UAUUCACAGCCAACGACUCNN | 391 |
| as | 385 | GAGUCGUUGGCUGUGAAUA | 112 | GAGUCGUUGGCUGUGAAUANN | 392 |
| s | 370 | UCACAGCCAACGACUCCGG | 113 | UCACAGCCAACGACUCCGGNN | 393 |
| as | 388 | CCGGAGUCGUUGGCUGUGA | 114 | CCGGAGUCGUUGGCUGUGANN | 394 |
| s | 390 | CCCCGCCGCUACACCAUUG | 115 | CCCCGCCGCUACACCAUUGNN | 395 |
| as | 408 | CAAUGGUGUAGCGGCGGGG | 116 | CAAUGGUGUAGCGGCGGGGNN | 396 |
| s | 4 | GAAGUCCACUCAUUCUUGG | 117 | GAAGUCCACUCAUUCUUGGNN | 397 |
| as | 22 | CCAAGAAUGAGUGGACUUC | 118 | CCAAGAAUGAGUGGACUUCNN | 398 |
| s | 412 | CCCUGCUGAGCCCCUACUC | 119 | CCCUGCUGAGCCCCUACUCNN | 399 |
| as | 430 | GAGUAGGGGCUCAGCAGGG | 120 | GAGUAGGGGCUCAGCAGGGNN | 400 |
| s | 417 | CUGAGCCCCUACUCCUAUU | 121 | CUGAGCCCCUACUCCUAUUNN | 401 |
| as | 435 | AAUAGGAGUAGGGGCUCAG | 122 | AAUAGGAGUAGGGGCUCAGNN | 402 |
| s | 418 | UGAGCCCCUACUCCUAUUC | 123 | UGAGCCCCUACUCCUAUUCNN | 403 |
| as | 436 | GAAUAGGAGUAGGGGCUCA | 124 | GAAUAGGAGUAGGGGCUCANN | 404 |
| s | 422 | CCCCUACUCCUAUUCCACC | 125 | CCCCUACUCCUAUUCCACCNN | 405 |
| as | 440 | GGUGGAAUAGGAGUAGGGG | 126 | GGUGGAAUAGGAGUAGGGGNN | 406 |
| s | 425 | CUACUCCUAUUCCACCACG | 127 | CUACUCCUAUUCCACCACGNN | 407 |
| as | 443 | CGUGGUGGAAUAGGAGUAG | 128 | CGUGGUGGAAUAGGAGUAGNN | 408 |
| s | 426 | UACUCCUAUUCCACCACGG | 129 | UACUCCUAUUCCACCACGGNN | 409 |
| as | 444 | CCGUGGUGGAAUAGGAGUA | 130 | CCGUGGUGGAAUAGGAGUANN | 410 |
| s | 427 | ACUCCUAUUCCACCACGGC | 131 | ACUCCUAUUCCACCACGGCNN | 411 |
| as | 445 | GCCGUGGUGGAAUAGGAGU | 132 | GCCGUGGUGGAAUAGGAGUNN | 412 |
| s | 429 | UCCUAUUCCACCACGGCUG | 133 | UCCUAUUCCACCACGGCUGNN | 413 |
| as | 447 | CAGCCGUGGUGGAAUAGGA | 134 | CAGCCGUGGUGGAAUAGGANN | 414 |
| s | 432 | UAUUCCACCACGGCUGUCG | 135 | UAUUCCACCACGGCUGUCGNN | 415 |
| as | 450 | CGACAGCCGUGGUGGAAUA | 136 | CGACAGCCGUGGUGGAAUANN | 416 |
| s | 433 | AUUCCACCACGGCUGUCGU | 137 | AUUCCACCACGGCUGUCGUNN | 417 |
| as | 451 | ACGACAGCCGUGGUGGAAU | 138 | ACGACAGCCGUGGUGGAAUNN | 418 |
| s | 437 | CACCACGGCUGUCGUCACC | 139 | CACCACGGCUGUCGUCACCNN | 419 |
| as | 455 | GGUGACGACAGCCGUGGUG | 140 | GGUGACGACAGCCGUGGUGNN | 420 |
| s | 438 | ACCACGGCUGUCGUCACCA | 141 | ACCACGGCUGUCGUCACCANN | 421 |
| as | 456 | UGGUGACGACAGCCGUGGU | 142 | UGGUGACGACAGCCGUGGUNN | 422 |
| s | 439 | CCACGGCUGUCGUCACCAA | 143 | CCACGGCUGUCGUCACCAANN | 423 |
| as | 457 | UUGGUGACGACAGCCGUGG | 144 | UUGGUGACGACAGCCGUGGNN | 424 |
| s | 441 | ACGGCUGUCGUCACCAAUC | 145 | ACGGCUGUCGUCACCAAUCNN | 425 |
| as | 459 | GAUUGGUGACGACAGCCGU | 146 | GAUUGGUGACGACAGCCGUNN | 426 |
| s | 442 | CGGCUGUCGUCACCAAUCC | 147 | CGGCUGUCGUCACCAAUCCNN | 427 |
| as | 460 | GGAUUGGUGACGACAGCCG | 148 | GGAUUGGUGACGACAGCCGNN | 428 |
| s | 449 | CGUCACCAAUCCCAAGGAA | 149 | CGUCACCAAUCCCAAGGAANN | 429 |
| as | 467 | UUCCUUGGGAUUGGUGACG | 150 | UUCCUUGGGAUUGGUGACGNN | 430 |
| s | 455 | CAAUCCCAAGGAAUGAGGG | 151 | CAAUCCCAAGGAAUGAGGGNN | 431 |
| as | 473 | CCCUCAUUCCUUGGGAUUG | 152 | CCCUCAUUCCUUGGGAUUGNN | 432 |
| s | 491 | CCUGAAGGACGAGGGAUGG | 153 | CCUGAAGGACGAGGGAUGGNN | 433 |
| as | 509 | CCAUCCCUCGUCCUUCAGG | 154 | CCAUCCCUCGUCCUUCAGGNN | 434 |
| s | 497 | GGACGAGGGAUGGGAUUUC | 155 | GGACGAGGGAUGGGAUUUCNN | 435 |
| as | 515 | GAAAUCCCAUCCCUCGUCC | 156 | GAAAUCCCAUCCCUCGUCCNN | 436 |
| s | 5 | AAGUCCACUCAUUCUUGGC | 157 | AAGUCCACUCAUUCUUGGCNN | 437 |
| as | 23 | GCCAAGAAUGAGUGGACUU | 158 | GCCAAGAAUGAGUGGACUUNN | 438 |
| s | 508 | GGGAUUUCAUGUAACCAAG | 159 | GGGAIJUUCAUGUAACCAAGNN | 439 |
| as | 526 | CUUGGUUACAUGAAAUCCC | 160 | CUUGGUUACAUGAAAUCCCNN | 440 |
| s | 509 | GGAUUUCAUGUAACCAAGA | 161 | GGAUUUCAUGUAACCAAGANN | 441 |
| as | 527 | UCUUGGUUACAUGAAAUCC | 162 | UCUUGGUUACAUGAAAUCCNN | 442 |
| s | 514 | UCAUGUAACCAAGAGUAUU | 163 | UCAUGUAACCAAGAGUAUUNN | 443 |
| as | 532 | AAUACUCUUGGUUACAUGA | 164 | AAUACUCUUGGUUACAUGANN | 444 |
| s | 516 | AUGUAACCAAGAGUAUUCC | 165 | AUGUAACCAAGAGUAUUCCNN | 445 |
| as | 534 | GGAAUACUCUUGGUUACAU | 166 | GGAAUACUCUUGGUUACAUNN | 446 |
| s | 517 | UGUAACCAAGAGUAUUCCA | 167 | UGUAACCAAGAGUAUUCCANN | 447 |
| as | 535 | UGGAAUACUCUUGGUUACA | 168 | UGGAAUACUCUUGGUUACANN | 448 |
| s | 518 | GUAACCAAGAGUAUUCCAU | 169 | GUAACCAAGAGUAUUCCAUNN | 449 |
| as | 536 | AUGGAAUACUCUUGGUUAC | 170 | AUGGAAUACUCUUGGUUACNN | 450 |
| s | 54 | UGCCUUGCUGGACUGGUAU | 171 | UGCCUUGCUGGACUGGUAUNN | 451 |
| as | 72 | AUACCAGUCCAGCAAGGCA | 172 | AUACCAGUCCAGCAAGGCANN | 452 |
| s | 543 | UAAAGCAGUGUUUUCACCU | 173 | UAAAGCAGUGUUUUCACCUNN | 453 |
| as | 561 | AGGUGAAAACACUGCUUUA | 174 | AGGUGAAAACACUGCUUUANN | 454 |
| s | 55 | GCCUUGCUGGACUGGUAUU | 175 | GCCUUGCUGGACUGGUAUUNN | 455 |
| as | 73 | AAUACCAGUCCAGCAAGGC | 176 | AAUACCAGUCCAGCAAGGCNN | 456 |
| s | 551 | UGUUUUCACCUCAUAUGCU | 177 | UGUUUUCACCUCAUAUGCUNN | 457 |
| as | 569 | AGCAUAUGAGGUGAAAACA | 178 | AGCAUAUGAGGUGAAAACANN | 458 |
| s | 552 | GUUUUCACCUCAUAUGCUA | 179 | GUUUUCACCUCAUAUGCUANN | 459 |
| as | 570 | UAGCAUAUGAGGUGAAAAC | 180 | UAGCAUAUGAGGUGAAAACNN | 460 |
| s | 553 | UUUUCACCUCAUAUGCUAU | 181 | UUUUCACCUCAUAUGCUAUNN | 461 |
| as | 571 | AUAGCAUAUGAGGUGAAAA | 182 | AUAGCAUAUGAGGUGAAAANN | 462 |
| s | 555 | UUCACCUCAUAUGCUAUGU | 183 | UUCACCUCAUAUGCUAUGUNN | 463 |
| as | 573 | ACAUAGCAUAUGAGGUGAA | 184 | ACAUAGCAUAUGAGGUGAANN | 464 |
| s | 557 | CACCUCAUAUGCUAUGUUA | 185 | CACCUCAUAUGCUAUGUUANN | 465 |
| as | 575 | UAACAUAGCAUAUGAGGUG | 186 | UAACAUAGCAUAUGAGGUGNN | 466 |
| s | 56 | CCUUGCUGGACUGGUAUUU | 187 | CCUUGCUGGACUGGUAUUUNN | 467 |
| as | 74 | AAAUACCAGUCCAGCAAGG | 188 | AAAUACCAGUCCAGCAAGGNN | 468 |
| s | 563 | AUAUGCUAUGUUAGAAGUC | 189 | AUAUGCUAUGUUAGAAGUCNN | 469 |
| as | 581 | GACUUCUAACAUAGCAUAU | 190 | GACUUCUAACAUAGCAUAUNN | 470 |
| s | 564 | UAUGCUAUGUUAGAAGUCC | 191 | UAUGCUAUGUUAGAAGUCCNN | 471 |
| as | 582 | GGACUUCUAACAUAGCAUA | 192 | GGACUUCUAACAUAGCAUANN | 472 |
| s | 566 | UGCUAUGUUAGAAGUCCAG | 193 | UGCUAUGUUAGAAGUCCAGNN | 473 |
| as | 584 | CUGGACUUCUAACAUAGCA | 194 | CUGGACUUCUAACAUAGCANN | 474 |
| s | 57 | CUUGCUGGACUGGUAUUUG | 195 | CUUGCUGGACUGGUAUUUGNN | 475 |
| as | 75 | CAAAUACCAGUCCAGCAAG | 196 | CAAAUACCAGUCCAGCAAGNN | 476 |
| s | 578 | AGUCCAGGCAGAGACAAUA | 197 | AGUCCAGGCAGAGACAAUANN | 477 |
| as | 596 | AUUGUCUCUGCCUGGACUTT | 198 | AUUGUCUCUGCCUGGACUTTNN | 478 |
| s | 580 | UCCAGGCAGAGACAAUAAA | 199 | UCCAGGCAGAGACAAUAAANN | 479 |
| as | 598 | UUUAUUGUCUCUGCCUGGA | 200 | UUUAUUGUCUCUGCCUGGANN | 480 |
| s | 607 | GUGAAAGGCACUUUUCAUU | 201 | GUGAAAGGCACUUUUCAUUNN | 481 |
| as | 625 | AAUGAAAAGUGCCUUUCAC | 202 | AAUGAAAAGUGCCUUUCACNN | 482 |
| s | 62 | UGGACUGGUAUUUGUGUCU | 203 | UGGACUGGUAUUUGUGUCUNN | 483 |
| as | 80 | AGACACAAAUACCAGUCCA | 204 | AGACACAAAUACCAGUCCANN | 484 |
| s | 77 | GUCUGAGGCUGGCCCUACG | 205 | GUCUGAGGCUGGCCCUACGNN | 485 |
| as | 95 | CGUAGGGCCAGCCUCAGAC | 206 | CGUAGGGCCAGCCUCAGACNN | 486 |
| s | 79 | CUGAGGCUGGCCCUACGGG | 207 | CUGAGGCUGGCCCUACGGGNN | 487 |
| as | 97 | CCCGUAGGGCCAGCCUCAG | 208 | CCCGUAGGGCCAGCCUCAGNN | 488 |
| s | 81 | GAGGCUGGCCCUACGGGCA | 209 | GAGGCUGGCCCUACGGGCANN | 489 |
| as | 99 | UGCCCGUAGGGCCAGCCUC | 210 | UGCCCGUAGGGCCAGCCUCNN | 490 |
| s | 82 | AGGCUGGCCCUACGGGCAC | 211 | AGGCUGGCCCUACGGGCACNN | 491 |
| as | 100 | GUGCCCGUAGGGCCAGCCU | 212 | GUGCCCGUAGGGCCAGCCUNN | 492 |
| s | 84 | GCUGGCCCUACGGGCACCG | 213 | GCUGGCCCUACGGGCACCGNN | 493 |
| as | 102 | CGGUGCCCGUAGGGCCAGC | 214 | CGGUGCCCGUAGGGCCAGCNN | 494 |
| s | 85 | CUGGCCCUACGGGCACCGG | 215 | CUGGCCCUACGGGCACCGGNN | 495 |
| as | 103 | CCGGUGCCCGUAGGGCCAG | 216 | CCGGUGCCCGUAGGGCCAGNN | 496 |
| s | 87 | GGCCCUACGGGCACCGGUG | 217 | GGCCCUACGGGCACCGGUGNN | 497 |
| as | 105 | CACCGGUGCCCGUAGGGCC | 218 | CACCGGUGCCCGUAGGGCCNN | 498 |
| s | 9 | CCACUCAUUCUUGGCAGGA | 219 | CCACUCAUUCUUGGCAGGANN | 499 |
| as | 27 | UCCUGCCAAGAAUGAGUGG | 220 | UCCUGCCAAGAAUGAGUGGNN | 500 |
| s | 90 | CCUACGGGCACCGGUGAAU | 221 | CCUACGGGCACCGGUGAAUNN | 501 |
| as | 108 | AUUCACCGGUGCCCGUAGG | 222 | AUUCACCGGUGCCCGUAGGNN | 502 |
| s | 91 | CUACGGGCACCGGUGAAUC | 223 | CUACGGGCACCGGUGAAUCNN | 503 |
| as | 109 | GAUUCACCGGUGCCCGUAG | 224 | GAUUCACCGGUGCCCGUAGNN | 504 |
| s | 92 | UACGGGCACCGGUGAAUCC | 225 | UACGGGCACCGGUGAAUCCNN | 505 |
| as | 110 | GGAUUCACCGGUGCCCGUA | 226 | GGAUUCACCGGUGCCCGUANN | 506 |
| s | 93 | ACGGGCACCGGUGAAUCCA | 227 | ACGGGCACCGGUGAAUCCANN | 507 |
| as | 111 | UGGAUUCACCGGUGCCCGU | 228 | UGGADUCACCGGUGCCCGUNN | 508 |
| s | 97 | GCACCGGUGAAUCCAAGUG | 229 | GCACCGGUGAAUCCAAGUGNN | 509 |
| as | 115 | CACUUGGAUUCACCGGUGC | 230 | CACUUGGAUUCACCGGUGCNN | 510 |
| s | 98 | CACCGGUGAAUCCAAGUGU | 231 | CACCGGUGAAUCCAAGUGUNN | 511 |
| as | 116 | ACACUUGGAUUCACCGGUG | 232 | ACACUUGGAUUCACCGGUGNN | 512 |
| s | 167 | UGUGGCCAUGCAUGUGUUC | 233 | UGUGGCCAUGCAUGUGUUCNN | 513 |
| as | 185 | GAACACAUGCAUGGCCACA | 234 | GAACACAUGCAUGGCCACANN | 514 |
| s | 168 | GUGGCCAUGCAUGUGUUCA | 235 | GUGGCCAUGCAUGUGUUCANN | 515 |
| as | 186 | UGAACACAUGCAUGGCCAC | 236 | UGAACACAUGCAUGGCCACNN | 516 |
| s | 171 | GCCAUGCAUGUGUUCAGAA | 237 | GCCAUGCAUGUGUUCAGAANN | 517 |
| as | 189 | UUCUGAACACAUGCAUGGC | 238 | UUCUGAACACAUGCAUGGCNN | 518 |
| s | 432 | UAUUCCACCACGGCUGUCA | 239 | UAUUCCACCACGGCUGUCANN | 519 |
| as | 449 | UGACAGCCGUGGUGGAAUA | 240 | UGACAGCCGUGGUGGAAUANN | 520 |
| s | 447 | GUCAUCACCAAUCCCAAGG | 241 | GUCAUCACCAAUCCCAAGGNN | 521 |
| as | 465 | CCUUGGGAUUGGUGAUGAC | 242 | CCUUGGGAUUGGUGAUGACNN | 522 |
| s | 115 | GUCCUCUGAUGGUCAAAGU | 243 | GUCCUCUGAUGGUCAAAGUNN | 523 |
| as | 133 | ACUUUGACCAUCAGAGGAC | 244 | ACUUUGACCAUCAGAGGACNN | 524 |
| s | 122 | GAUGGUCAAAGUUCUAGAU | 245 | GAUGGUCAAAGUUCUAGAUNN | 525 |
| as | 140 | AUCUAGAACUUUGACCAUC | 246 | AUCUAGAACUUUGACCAUCNN | 526 |
| s | 139 | AUGCUGUCCGAGGCAGUCC | 247 | AUGCUGUCCGAGGCAGUCCNN | 527 |
| as | 157 | GGACUGCCUCGGACAGCAU | 248 | GGACUGCCUCGGACAGCAUNN | 528 |
| s | 172 | CCGUGCAUGUGUUCAGAAA | 249 | CCGUGCAUGUGUUCAGAAANN | 529 |
| as | 190 | UUUCUGAACACAUGCACGG | 250 | UUUCUGAACACAUGCACGGNN | 530 |
| s | 238 | AGUCUGGAGAGCUGCAUGG | 251 | AGUCUGGAGAGCUGCAUGGNN | 531 |
| as | 256 | CCAUGCAGCUCUCCAGACU | 252 | CCAUGCAGCUCUCCAGACUNN | 532 |
| s | 252 | CAUGGGCUCACAACUGAGG | 253 | CAUGGGCUCACAACUGAGGNN | 533 |
| as | 270 | CCUCAGUUGUGAGCCCAUG | 254 | CCUCAGUUGUGAGCCCAUGNN | 534 |
| s | 33 | UCUCAUCGUCUGCUCCUCC | 255 | UCUCAUCGUCUGCUCCUCCNN | 535 |
| as | 51 | GGAGGAGCAGACGAUGAGA | 256 | GGAGGAGCAGACGAUGAGANN | 536 |
| s | 340 | CCCCAUUCCAUGAGCAUGC | 257 | CCCCAUUCCAUGAGCAUGCNN | 537 |
| as | 358 | GCAUGCUCAUGGAAUGGGG | 258 | GCAUGCUCAUGGAAUGGGGNN | 538 |
| s | 421 | GCCCCUACUCCUAUUCCAC | 259 | GCCCCUACUCCUAUUCCACNN | 539 |
| as | 439 | GUGGAAUAGGAGUAGGGGC | 260 | GUGGAAUAGGAGUAGGGGCNN | 540 |
| s | 431 | CUAUUCCACCACGGCUGUC | 261 | CUAUUCCACCACGGCUGUCNN | 541 |
| as | 449 | GACAGCCGUGGUGGAAUAG | 262 | GACAGCCGUGGUGGAAUAGNN | 542 |
| s | 440 | CACGGCUGUCGUCACCAAU | 263 | CACGGCUGUCGUCACCAAUNN | 543 |
| as | 458 | AUUGGUGACGACAGCCGUG | 264 | AUUGGUGACGACAGCCGUGNN | 544 |
| s | 496 | AGGACGAGGGAUGGGAUUU | 265 | AGGACGAGGGAUGGGAUUUNN | 545 |
| as | 514 | AAAUCCCAUCCCUCGUCCU | 266 | AAAUCCCAUCCCUCGUCCUNN | 546 |
| s | 556 | UCACCUCAUAUGCUAUGUU | 267 | UCACCUCAUAUGCUAUGUUNN | 547 |
| as | 574 | AACAUAGCAUAUGAGGUGA | 268 | AACAUAGCAUAUGAGGUGANN | 548 |
| s | 559 | CCUCAUAUGCUAUGUUAGA | 269 | CCUCAUAUGCUAUGUUAGANN | 549 |
| as | 577 | UCUAACAUAGCAUAUGAGG | 270 | UCUAACAUAGCAUAUGAGGNN | 550 |
| s | 570 | AUGUUAGAAGUCCAGGCAG | 271 | AUGUUAGAAGUCCAGGCAGNN | 551 |
| as | 588 | CUGCCUGGACUUCUAACAU | 272 | CUGCCUGGACUUCUAACAUNN | 552 |
| s | 78 | UCUGAGGCUGGCCCUACGG | 273 | UCUGAGGCUGGCCCUACGGNN | 553 |
| as | 96 | CCGUAGGGCCAGCCUCAGA | 274 | CCGUAGGGCCAGCCUCAGANN | 554 |
| s | 87 | GGCCCUACGGGCACCGGUG | 275 | GGCCCUACGGGCACCGGUGNN | 555 |
| as | 105 | CACCGGUGCCCGUAGGGCC | 276 | CACCGGUGCCCGUAGGGCCNN | 556 |
| s | 95 | GGGCACCGGUGAAUCCAAG | 277 | GGGCACCGGUGAAUCCAAGNN | 557 |
| as | 113 | CUUGGAUUCACCGGUGCCC | 278 | CUUGGAUUCACCGGUGCCCNN | 558 |
| s | 167 | CCAUGCAUGUGUUCAGAAA | 279 | CCAUGCAUGUGUUCAGAAANN | 559 |
| as | 185 | UUUCUGAACACAUGCAUGG | 280 | UUUCUGAACACAUGCAUGGNN | 560 |

Strand: s = sense; as = antisense;
Position: position of 5′ base on transcript (NM_000371.2, SEQ ID NO: 1329)

TABLE 3B
Sense and antisense strand sequences of human TTR dsRNAs

| | | Sequence with 3′deoxythimidine | SEQ |
|---|---|---|---|
| Strand | Position | overhang (5′ to 3′) | ID NO: |
| s | 100 | CCGGUGAAUCCAAGUGUCCdTdT | 561 |
| as | 118 | GGACACUUGGAUUCACCGGdTdT | 562 |
| s | 11 | ACUCAUUCUUGGCAGGAUGdTdT | 563 |
| as | 29 | CAUCCUGCCAAGAAUGAGUdTdT | 564 |
| s | 111 | AAGUGUCCUCUGAUGGUCAdTdT | 565 |
| as | 129 | UGACCAUCAGAGGACACUUdTdT | 566 |
| s | 13 | UCAUUCUUGGCAGGAUGGCdTdT | 567 |
| as | 31 | GCCAUCCUGCCAAGAAUGAdTdT | 568 |
| s | 130 | AAGUUCUAGAUGCUGUCCGdTdT | 569 |
| as | 148 | CGGACAGCAUCUAGAACUUdTdT | 570 |
| s | 132 | GUUCUAGAUGCUGUCCGAGdTdT | 571 |
| as | 150 | CUCGGACAGCAUCUAGAACdTdT | 572 |
| s | 135 | CUAGAUGCUGUCCGAGGCAdTdT | 573 |
| as | 153 | UGCCUCGGACAGCAUCUAGdTdT | 574 |
| s | 138 | GAUGCUGUCCGAGGCAGUCdTdT | 575 |
| as | 156 | GACUGCCUCGGACAGCAUCdTdT | 576 |
| s | 14 | CAUUCUUGGCAGGAUGGCUdTdT | 577 |
| as | 32 | AGCCAUCCUGCCAAGAAUGdTdT | 578 |
| s | 140 | UGCUGUCCGAGGCAGUCCUdTdT | 579 |
| as | 158 | AGGACUGCCUCGGACAGCAdTdT | 580 |
| s | 146 | CCGAGGCAGUCCUGCCAUCdTdT | 581 |
| as | 164 | GAUGGCAGGACUGCCUCGGdTdT | 582 |
| s | 152 | CAGUCCUGCCAUCAAUGUGdTdT | 583 |
| as | 170 | CACAUUGAUGGCAGGACUGdTdT | 584 |
| s | 164 | CAAUGUGGCCGUGCAUGUGdTdT | 585 |
| as | 182 | CACAUGCACGGCCACAUUGdTdT | 586 |
| s | 178 | AUGUGUUCAGAAAGGCUGCdTdT | 587 |
| as | 196 | GCAGCCUUUCUGAACACAUdTdT | 588 |
| s | 2 | CAGAAGUCCACUCAUUCUUdTdT | 589 |
| as | 20 | AAGAAUGAGUGGACUUCUGdTdT | 590 |
| s | 21 | GGCAGGAUGGCUUCUCAUCdTdT | 591 |
| as | 39 | GAUGAGAAGCCAUCCUGCCdTdT | 592 |
| s | 210 | GAGCCAUUUGCCUCUGGGAdTdT | 593 |
| as | 228 | UCCCAGAGGCAAAUGGCUCdTdT | 594 |
| s | 23 | CAGGAUGGCUUCUCAUCGUdTdT | 595 |
| as | 41 | ACGAUGAGAAGCCAUCCUGdTdT | 596 |
| s | 24 | AGGAUGGCUUCUCAUCGUCdTdT | 597 |
| as | 42 | GACGAUGAGAAGCCAUCCUdTdT | 598 |
| s | 245 | AGAGCUGCAUGGGCUCACAdTdT | 599 |
| as | 263 | UGUGAGCCCAUGCAGCUCUdTdT | 600 |
| s | 248 | GCUGCAUGGGCUCACAACUdTdT | 601 |
| as | 266 | AGUUGUGAGCCCAUGCAGCdTdT | 602 |
| s | 25 | GGAUGGCUUCUCAUCGUCUdTdT | 603 |
| as | 43 | AGACGAUGAGAAGCCAUCCdTdT | 604 |
| s | 251 | GCAUGGGCUCACAACUGAGdTdT | 605 |
| as | 269 | CUCAGUUGUGAGCCCAUGCdTdT | 606 |
| s | 253 | AUGGGCUCACAACUGAGGAdTdT | 607 |
| as | 271 | UCCUCAGUUGUGAGCCCAUdTdT | 608 |
| s | 254 | UGGGCUCACAACUGAGGAGdTdT | 609 |
| as | 272 | CUCCUCAGUUGUGAGCCCAdTdT | 610 |
| s | 270 | GAGGAAUUUGUAGAAGGGAdTdT | 611 |
| as | 288 | UCCCUUCUACAAAUUCCUCdTdT | 612 |
| s | 276 | UUUGUAGAAGGGAUAUACAdTdT | 613 |
| as | 294 | UGUAUAUCCCUUCUACAAAdTdT | 614 |
| s | 277 | UUGUAGAAGGGAUAUACAAdTdT | 615 |
| as | 295 | UUGUAUAUCCCUUCUACAAdTdT | 616 |
| s | 278 | UGUAGAAGGGAUAUACAAAdTdT | 617 |
| as | 296 | UUUGUAUAUCCCUUCUACAdTdT | 618 |
| s | 281 | AGAAGGGAUAUACAAAGUGdTdT | 619 |
| as | 299 | CACUUUGUAUAUCCCUUCUdTdT | 620 |
| s | 295 | AAGUGGAAAUAGACACCAAdTdT | 621 |
| as | 313 | UUGGUGUCUAUUUCCACUUdTdT | 622 |
| s | 299 | GGAAAUAGACACCAAAUCUdTdT | 623 |
| as | 317 | AGAUUUGGUGUCUAUUUCCdTdT | 624 |
| s | 300 | GAAAUAGACACCAAAUCUUdTdT | 625 |
| as | 318 | AAGAUUUGGUGUCUAUUUCdTdT | 626 |
| s | 303 | AUAGACACCAAAUCUUACUdTdT | 627 |
| as | 321 | AGUAAGAUUUGGUGUCUAUdTdT | 628 |
| s | 304 | UAGACACCAAAUCUUACUGdTdT | 629 |
| as | 322 | CAGUAAGAUUUGGUGUCUAdTdT | 630 |
| s | 305 | AGACACCAAAUCUUACUGGdTdT | 631 |
| as | 323 | CCAGUAAGAUUUGGUGUCUdTdT | 632 |
| s | 317 | UUACUGGAAGGCACUUGGCdTdT | 633 |
| as | 335 | GCCAAGUGCCUUCCAGUAAdTdT | 634 |
| s | 32 | UUCUCAUCGUCUGCUCCUCdTdT | 635 |
| as | 50 | GAGGAGCAGACGAUGAGAAdTdT | 636 |
| s | 322 | GGAAGGCACUUGGCAUCUCdTdT | 637 |
| as | 340 | GAGAUGCCAAGUGCCUUCCdTdT | 638 |
| s | 326 | GGCACUUGGCAUCUCCCCAdTdT | 639 |
| as | 344 | UGGGGAGAUGCCAAGUGCCdTdT | 640 |
| s | 333 | GGCAUCUCCCCAUUCCAUGdTdT | 641 |
| as | 351 | AUGGAAUGGGGAGAUGCCTTdTdT | 642 |
| s | 334 | GCAUCUCCCCAUUCCAUGAdTdT | 643 |
| as | 352 | UCAUGGAAUGGGGAGAUGCdTdT | 644 |
| s | 335 | CAUCUCCCCAUUCCAUGAGdTdT | 645 |
| as | 353 | CUCAUGGAAUGGGGAGAUGdTdT | 646 |
| s | 336 | AUCUCCCCAUUCCAUGAGCdTdT | 647 |
| as | 354 | GCUCAUGGAAUGGGGAGAUdTdT | 648 |
| s | 338 | CUCCCCAUUCCAUGAGCAUdTdT | 649 |
| as | 356 | AUGCUCAUGGAAUGGGGAGdTdT | 650 |
| s | 341 | CCCAUUCCAUGAGCAUGCAdTdT | 651 |
| as | 359 | UGCAUGCUCAUGGAAUGGGdTdT | 652 |
| s | 347 | CCAUGAGCAUGCAGAGGUGdTdT | 653 |
| as | 365 | CACCUCUGCAUGCUCAUGGdTdT | 654 |
| s | 352 | AGCAUGCAGAGGUGGUAUUdTdT | 655 |
| as | 370 | AAUACCACCUCUGCAUGCUdTdT | 656 |
| s | 354 | CAUGCAGAGGUGGUAUUCAdTdT | 657 |
| as | 372 | UGAAUACCACCUCUGCAUGdTdT | 658 |
| s | 355 | AUGCAGAGGUGGUAUUCACdTdT | 659 |
| as | 373 | GUGAAUACCACCUCUGCAUdTdT | 660 |
| s | 362 | GGUGGUAUUCACAGCCAACdTdT | 661 |
| as | 380 | GUUGGCUGUGAAUACCACCdTdT | 662 |
| s | 363 | GUGGUAUUCACAGCCAACGdTdT | 663 |
| as | 381 | CGUUGGCUGUGAAUACCACdTdT | 664 |
| s | 364 | UGGUAUUCACAGCCAACGAdTdT | 665 |
| as | 382 | UCGUUGGCUGUGAAUACCAdTdT | 666 |
| s | 365 | GGUAUUCACAGCCAACGACdTdT | 667 |
| as | 383 | GUCGUUGGCUGUGAAUACCdTdT | 668 |
| s | 366 | GUAUUCACAGCCAACGACUdTdT | 669 |
| as | 384 | AGUCGUUGGCUGUGAAUACdTdT | 670 |
| s | 367 | UAUUCACAGCCAACGACUCdTdT | 671 |
| as | 385 | GAGUCGUUGGCUGUGAAUAdTdT | 672 |
| s | 370 | UCACAGCCAACGACUCCGGdTdT | 673 |
| as | 388 | CCGGAGUCGUUGGCUGUGAdTdT | 674 |
| s | 390 | CCCCGCCGCUACACCAUUGdTdT | 675 |
| as | 408 | CAAUGGUGUAGCGGCGGGGdTdT | 676 |
| s | 4 | GAAGUCCACUCAUUCUUGGdTdT | 677 |
| as | 22 | CCAAGAAUGAGUGGACUUCdTdT | 678 |
| s | 412 | CCCUGCUGAGCCCCUACUCdTdT | 679 |
| as | 430 | GAGUAGGGGCUCAGCAGGGdTdT | 680 |
| s | 417 | CUGAGCCCCUACUCCUAUUdTdT | 681 |
| as | 435 | AAUAGGAGUAGGGGCUCAGdTdT | 682 |
| s | 418 | UGAGCCCCUACUCCUAUUCdTdT | 683 |
| as | 436 | GAAUAGGAGUAGGGGCUCAdTdT | 684 |
| s | 422 | CCCCUACUCCUAUUCCACCdTdT | 685 |
| as | 440 | GGUGGAAUAGGAGUAGGGGdTdT | 686 |
| s | 425 | CUACUCCUAUUCCACCACGdTdT | 687 |
| as | 443 | CGUGGUGGAAUAGGAGUAGdTdT | 688 |
| s | 426 | UACUCCUAUUCCACCACGGdTdT | 689 |
| as | 444 | CCGUGGUGGAAUAGGAGUAdTdT | 690 |
| s | 427 | ACUCCUAUUCCACCACGGCdTdT | 691 |
| as | 445 | GCCGUGGUGGAAUAGGAGUdTdT | 692 |
| s | 429 | UCCUAUUCCACCACGGCUGdTdT | 693 |
| as | 447 | CAGCCGUGGUGGAAUAGGAdTdT | 694 |
| s | 432 | UAUUCCACCACGGCUGUCGdTdT | 695 |
| as | 450 | CGACAGCCGUGGUGGAAUAdTdT | 696 |
| s | 433 | AUUCCACCACGGCUGUCGUdTdT | 697 |
| as | 451 | ACGACAGCCGUGGUGGAAUdTdT | 698 |
| s | 437 | CACCACGGCUGUCGUCACCdTdT | 699 |
| as | 455 | GGUGACGACAGCCGUGGUGdTdT | 700 |
| s | 438 | ACCACGGCUGUCGUCACCAdTdT | 701 |
| as | 456 | UGGUGACGACAGCCGUGGUdTdT | 702 |
| s | 439 | CCACGGCUGUCGUCACCAAdTdT | 703 |
| as | 457 | UUGGUGACGACAGCCGUGGdTdT | 704 |
| s | 441 | ACGGCUGUCGUCACCAAUCdTdT | 705 |
| as | 459 | GAUUGGUGACGACAGCCGUdTdT | 706 |
| s | 442 | CGGCUGUCGUCACCAAUCCdTdT | 707 |
| as | 460 | GGAUUGGUGACGACAGCCGdTdT | 708 |
| s | 449 | CGUCACCAAUCCCAAGGAAdTdT | 709 |
| as | 467 | UUCCUUGGGAUUGGUGACGdTdT | 710 |
| s | 455 | CAAUCCCAAGGAAUGAGGGdTdT | 711 |
| as | 473 | CCCUCAUUCCUUGGGAUUGdTdT | 712 |
| s | 491 | CCUGAAGGACGAGGGAUGGdTdT | 713 |
| as | 509 | CCAUCCCUCGUCCUUCAGGdTdT | 714 |
| s | 497 | GGACGAGGGAUGGGAUUUCdTdT | 715 |
| as | 515 | GAAAUCCCAUCCCUCGUCCdTdT | 716 |
| s | 5 | AAGUCCACUCAUUCUUGGCdTdT | 717 |
| as | 23 | GCCAAGAAUGAGUGGACUUdTdT | 718 |
| s | 508 | GGGAUUUCAUGUAACCAAGdTdT | 719 |
| as | 526 | CUUGGUUACAUGAAAUCCCdTdT | 720 |
| s | 509 | GGAUUUCAUGUAACCAAGAdTdT | 721 |
| as | 527 | UCUUGGUUACAUGAAAUCCdTdT | 722 |
| s | 514 | UCAUGUAACCAAGAGUAUUdTdT | 723 |
| as | 532 | AAUACUCUUGGUUACAUGAdTdT | 724 |
| s | 516 | AUGUAACCAAGAGUAUUCCdTdT | 725 |
| as | 534 | GGAAUACUCUUGGUUACAUdTdT | 726 |
| s | 517 | UGUAACCAAGAGUAUUCCAdTdT | 727 |
| as | 535 | UGGAAUACUCUUGGUUACAdTdT | 728 |
| s | 518 | GUAACCAAGAGUAUUCCAUdTdT | 729 |
| as | 536 | AUGGAAUACUCUUGGUUACdTdT | 730 |
| s | 54 | UGCCUUGCUGGACUGGUAUdTdT | 731 |
| as | 72 | AUACCAGUCCAGCAAGGCAdTdT | 732 |
| s | 543 | UAAAGCAGUGUUUUCACCUdTdT | 733 |
| as | 561 | AGGUGAAAACACUGCUUUAdTdT | 734 |
| s | 55 | GCCUUGCUGGACUGGUAUUdTdT | 735 |
| as | 73 | AAUACCAGUCCAGCAAGGCdTdT | 736 |
| s | 551 | UGUUUUCACCUCAUAUGCUdTdT | 737 |
| as | 569 | AGCAUAUGAGGUGAAAACAdTdT | 738 |
| s | 552 | GUUUUCACCUCAUAUGCUAdTdT | 739 |
| as | 570 | UAGCAUAUGAGGUGAAAACdTdT | 740 |
| s | 553 | UUUUCACCUCAUAUGCUAUdTdT | 741 |
| as | 571 | AUAGCAUAUGAGGUGAAAAdTdT | 742 |
| s | 555 | UUCACCUCAUAUGCUAUGUdTdT | 743 |
| as | 573 | ACAUAGCAUAUGAGGUGAAdTdT | 744 |
| s | 557 | CACCUCAUAUGCUAUGUUAdTdT | 745 |
| as | 575 | UAACAUAGCAUAUGAGGUGdTdT | 746 |
| s | 56 | CCUUGCUGGACUGGUAUUUdTdT | 747 |
| as | 74 | AAAUACCAGUCCAGCAAGGdTdT | 748 |
| s | 563 | AUAUGCUAUGUUAGAAGUCdTdT | 749 |
| as | 581 | GACUUCUAACAUAGCAUAUdTdT | 750 |
| s | 564 | UAUGCUAUGUUAGAAGUCCdTdT | 751 |
| as | 582 | GGACUUCUAACAUAGCAUAdTdT | 752 |
| s | 566 | UGCUAUGUUAGAAGUCCAGdTdT | 753 |
| as | 584 | CUGGACUUCUAACAUAGCAdTdT | 754 |
| s | 57 | CUUGCUGGACUGGUAUUUGdTdT | 755 |
| as | 75 | CAAAUACCAGUCCAGCAAGdTdT | 756 |
| s | 578 | AGUCCAGGCAGAGACAAUAdTdT | 757 |
| as | 596 | AUUGUCUCUGCCUGGACUTTdTdT | 758 |
| s | 580 | UCCAGGCAGAGACAAUAAAdTdT | 759 |
| as | 598 | UUUAUUGUCUCUGCCUGGAdTdT | 760 |
| s | 607 | GUGAAAGGCACUUUUCAUUdTdT | 761 |
| as | 625 | AAUGAAAAGUGCCUUUCACdTdT | 762 |
| s | 62 | UGGACUGGUAUUUGUGUCUdTdT | 763 |
| as | 80 | AGACACAAAUACCAGUCCAdTdT | 764 |
| s | 77 | GUCUGAGGCUGGCCCUACGdTdT | 765 |
| as | 95 | CGUAGGGCCAGCCUCAGACdTdT | 766 |
| s | 79 | CUGAGGCUGGCCCUACGGGdTdT | 767 |
| as | 97 | CCCGUAGGGCCAGCCUCAGdTdT | 768 |
| s | 81 | GAGGCUGGCCCUACGGGCAdTdT | 769 |
| as | 99 | UGCCCGUAGGGCCAGCCUCdTdT | 770 |
| s | 82 | AGGCUGGCCCUACGGGCACdTdT | 771 |
| as | 100 | GUGCCCGUAGGGCCAGCCUdTdT | 772 |
| s | 84 | GCUGGCCCUACGGGCACCGdTdT | 773 |
| as | 102 | CGGUGCCCGUAGGGCCAGCdTdT | 774 |
| s | 85 | CUGGCCCUACGGGCACCGGdTdT | 775 |
| as | 103 | CCGGUGCCCGUAGGGCCAGdTdT | 776 |
| s | 87 | GGCCCUACGGGCACCGGUGdTdT | 777 |
| as | 105 | CACCGGUGCCCGUAGGGCCdTdT | 778 |
| s | 9 | CCACUCAUUCUUGGCAGGAdTdT | 779 |
| as | 27 | UCCUGCCAAGAAUGAGUGGdTdT | 780 |
| s | 90 | CCUACGGGCACCGGUGAAUdTdT | 781 |
| as | 108 | AUUCACCGGUGCCCGUAGGdTdT | 782 |
| s | 91 | CUACGGGCACCGGUGAAUCdTdT | 783 |
| as | 109 | GAUUCACCGGUGCCCGUAGdTdT | 784 |
| s | 92 | UACGGGCACCGGUGAAUCCdTdT | 785 |
| as | 110 | GGAUUCACCGGUGGCCGUAdTdT | 786 |
| s | 93 | ACGGGCACCGGUGAAUCCAdTdT | 787 |
| as | 111 | UGGAUUCACCGGUGCCCGUdTdT | 788 |
| s | 97 | GCACCGGUGAAUCCAAGUGdTdT | 789 |
| as | 115 | CACUUGGAUUCACCGGUGCdTdT | 790 |
| s | 98 | CACCGGUGAAUCCAAGUGUdTdT | 791 |
| as | 116 | ACACUUGGAUUCACCGGUGdTdT | 792 |
| s | 167 | UGUGGCCAUGCAUGUGUUCdTdT | 793 |
| as | 185 | GAACACAUGCAUGGCCACAdTdT | 794 |
| s | 168 | GUGGCCAUGCAUGUGUUCAdTdT | 795 |
| as | 186 | UGAACACAUGCAUGGCCACdTdT | 796 |
| s | 171 | GCCAUGCAUGUGUUCAGAAdTdT | 797 |
| as | 189 | UUCUGAACACAUGCAUGGCdTdT | 798 |
| s | 432 | UAUUCCACCACGGCUGUCAdTdT | 799 |
| as | 449 | UGACAGCCGUGGUGGAAUAdTdT | 800 |
| s | 447 | GUCAUCACCAAUCCCAAGGdTdT | 801 |
| as | 465 | CCUUGGGAUUGGUGAUGACdTdT | 802 |
| 5 | 115 | GUCCUCUGAUGGUCAAAGUdTdT | 803 |
| as | 133 | ACUUUGACCAUCAGAGGACdTdT | 804 |
| s | 122 | GAUGGUCAAAGUUCUAGAUdTdT | 805 |
| as | 140 | AUCUAGAACUUUGACCAUCdTdT | 806 |
| s | 139 | AUGCUGUCCGAGGCAGUCCdTdT | 807 |
| as | 157 | GGACUGCCUCGGACAGCAUdTdT | 808 |
| s | 172 | CCGUGCAUGUGUUCAGAAAdTdT | 809 |
| as | 190 | UUUCUGAACACAUGCACGGdTdT | 810 |
| s | 238 | AGUCUGGAGAGCUGCAUGGdTdT | 811 |
| as | 256 | CCAUGCAGCUCUCCAGACUdTdT | 812 |
| s | 252 | CAUGGGCUCACAACUGAGGdTdT | 813 |
| as | 270 | CCUCAGUUGUGAGCCCAUGdTdT | 814 |
| s | 33 | UCUCAUCGUCUGCUCCUCCdTdT | 815 |
| as | 51 | GGAGGAGCAGACGAUGAGAdTdT | 816 |
| s | 340 | CCCCAUUCCAUGAGCAUGCdTdT | 817 |
| as | 358 | GCAUGCUCAUGGAAUGGGGdTdT | 818 |
| s | 421 | GCCCCUACUCCUAUUCCACdTdT | 819 |
| as | 439 | GUGGAAUAGGAGUAGGGGCdTdT | 820 |
| s | 431 | CUAUUCCACCACGGCUGUCdTdT | 821 |
| as | 449 | GACAGCCGUGGUGGAAUAGdTdT | 822 |
| s | 440 | CACGGCUGUCGUCACCAAUdTdT | 823 |
| as | 458 | AUUGGUGACGACAGCCGUGdTdT | 824 |
| s | 496 | AGGACGAGGGAUGGGAUUUdTdT | 825 |
| as | 514 | AAAUCCCAUCCCUCGUCCUdTdT | 826 |
| s | 556 | UCACCUCAUAUGCUAUGUUdTdT | 827 |
| as | 574 | AACAUAGCAUAUGAGGUGAdTdT | 828 |
| s | 559 | CCUCAUAUGCUAUGUUAGAdTdT | 829 |
| as | 577 | UCUAACAUAGCAUAUGAGGdTdT | 830 |
| s | 570 | AUGUUAGAAGUCCAGGCAGdTdT | 831 |
| as | 588 | CUGCCUGGACUUCUAACAUdTdT | 832 |
| s | 78 | UCUGAGGCUGGCCCUACGGdTdT | 833 |
| as | 96 | CCGUAGGGCCAGCCUCAGAdTdT | 834 |
| s | 87 | GGCCCUACGGGCACCGGUGdTdT | 835 |
| as | 105 | CACCGGUGCCCGUAGGGCCdTdT | 836 |
| s | 95 | GGGCACCGGUGAAUCCAAGdTdT | 837 |
| as | 113 | CUUGGAUUCACCGGUGCCCdTdT | 838 |
| s | 167 | CCAUGCAUGUGUUCAGAAAdTdT | 839 |
| as | 185 | UUUCUGAACACAUGCAUGGdTdT | 840 |

Strand: s = sense; as = antisense;
Position: position of 5′ base on transcript (NM_000371.2, SEQ ID NO. 1329)

TABLE 4
Chemically modified sense and antisense strand sequences of
human TTR dsRNAs

| Strand | Oligo # | Position | Sequence (5′ to 3′) | SEQ ID NO: |
|---|---|---|---|---|
| s | A-32153 | 100 | ccGGuGAAuccAAGuGuccdTdT | 841 |
| as | A-32154 | 118 | GGAcACUUGGAUUcACCGGdTdT | 842 |
| s | A-32155 | 11 | AcucAuucuuGGcAGGAuGdTdT | 843 |
| as | A-32156 | 29 | cAUCCUGCcAAGAAUGAGUdTdT | 844 |
| s | A-32157 | 111 | AAGuGuccucuGAuGGucAdTdT | 845 |
| as | A-32158 | 129 | UGACcAUcAGAGGAcACUUdTdT | 846 |
| s | A-32163 | 13 | ucAuucuuGGcAGGAuGGcdTdT | 847 |
| as | A-32164 | 31 | GCcAUCCUGCcAAGAAUGAdTdT | 848 |
| s | A-32165 | 130 | AAGuucuAGAuGcuGuccGdTdT | 849 |
| as | A-32166 | 148 | CGGAcAGcAUCuAGAACUUdTdT | 850 |
| s | A-32167 | 132 | GuucuAGAuGcuGuccGAGdTdT | 851 |
| as | A-32168 | 150 | CUCGGAcAGcAUCuAGAACdTdT | 852 |
| s | A-32169 | 135 | cuAGAuGcuGuccGAGGcAdTdT | 853 |
| as | A-32170 | 153 | UGCCUCGGAcAGcAUCuAGdTdT | 854 |
| s | A-32171 | 138 | GAuGcuGuccGAGGcAGucdTdT | 855 |
| as | A-32172 | 156 | GACUGCCUCGGAcAGcAUCdTdT | 856 |
| s | A-32175 | 14 | cAuucuuGGcAGGAuGGcudTdT | 857 |
| as | A-32176 | 32 | AGCcAUCCUGCcAAGAAUGdTdT | 858 |
| s | A-32177 | 140 | uGcuGuccGAGGcAGuccudTdT | 859 |
| as | A-32178 | 158 | AGGACUGCCUCGGAcAGcAdTdT | 860 |
| s | A-32179 | 146 | ccGAGGcAGuccuGccAucdTdT | 861 |
| as | A-32180 | 164 | GAUGGcAGGACUGCCUCGGdTdT | 862 |
| s | A-32181 | 152 | cAGuccuGccAucAAuGuGdTdT | 863 |
| as | A-32182 | 170 | cAcAUUGAUGGcAGGACUGdTdT | 864 |
| s | A-32183 | 164 | cAAuGuGGccGuGcAuGuGdTdT | 865 |
| as | A-32184 | 182 | cAcAUGcACGGCcAcAUUGdTdT | 866 |
| s | A-32187 | 178 | AuGuGuucAGAAAGGcuGcdTdT | 867 |
| as | A-32188 | 196 | GcAGCCUUUCUGAAcAcAUdTdT | 868 |
| s | A-32189 | 2 | cAGAAGuccAcucAuucuudTdT | 869 |
| as | A-32190 | 20 | AAGAAUGAGUGGACUUCUGdTdT | 870 |
| s | A-32191 | 21 | GGcAGGAuGGcuucucAucdTdT | 871 |
| as | A-32192 | 39 | GAUGAGAAGCcAUCCUGCCdTdT | 872 |
| s | A-32193 | 210 | GAGccAuuuGccucuGGGAdTdT | 873 |
| as | A-32194 | 228 | UCCcAGAGGcAAAUGGCUCdTdT | 874 |
| s | A-32195 | 23 | cAGGAuGGcuucucAucGudTdT | 875 |
| as | A-32196 | 41 | ACGAUGAGAAGCcAUCCUGdTdT | 876 |
| s | A-32199 | 24 | AGGAuGGcuucucAucGucdTdT | 877 |
| as | A-32200 | 42 | GACGAUGAGAAGCcAUCCUdTdT | 878 |
| s | A-32201 | 245 | AGAGcuGcAuGGGcucAcAdTdT | 879 |
| as | A-32202 | 263 | UGUGAGCCcAUGcAGCUCUdTdT | 880 |
| s | A-32203 | 248 | GcuGcAuGGGcucAcAAcudTdT | 881 |
| as | A-32204 | 266 | AGUUGUGAGCCcAUGcAGCdTdT | 882 |
| s | A-32205 | 25 | GGAuGGcuucucAucGucudTdT | 883 |
| as | A-32206 | 43 | AGACGAUGAGAAGCcAUCCdTdT | 884 |
| s | A-32207 | 251 | GcAuGGGcucAcAAcuGAGdTdT | 885 |
| as | A-32208 | 269 | CUcAGUUGUGAGCCcAUGCdTdT | 886 |
| s | A-32211 | 253 | AuGGGcucAcAAcuGAGGAdTdT | 887 |
| as | A-32212 | 271 | UCCUcAGUUGUGAGCCcAUdTdT | 888 |
| s | A-32213 | 254 | uGGGcucAcAAcuGAGGAGdTdT | 889 |
| as | A-32214 | 272 | CUCCUcAGUUGUGAGCCcAdTdT | 890 |
| s | A-32215 | 270 | GAGGAAuuuGuAGAAGGGAdTdT | 891 |
| as | A-32216 | 288 | UCCCUUCuAcAAAUUCCUCdTdT | 892 |
| s | A-32217 | 276 | uuuGuAGAAGGGAuAuAcAdTdT | 893 |
| as | A-32218 | 294 | UGuAuAUCCCUUCuAcAAAdTdT | 894 |
| s | A-32219 | 277 | uuGuAGAAGGGAuAuAcAAdTdT | 895 |
| as | A-32220 | 295 | UUGuAuAUCCCUUCuAcAAdTdT | 896 |
| s | A-32221 | 278 | uGuAGAAGGGAuAuAcAAAdTdT | 897 |
| as | A-32222 | 296 | UUUGuAuAUCCCUUCuAcAdTdT | 898 |
| s | A-32223 | 281 | AGAAGGGAuAuAcAAAGuGdTdT | 899 |
| as | A-32224 | 299 | cACUUUGuAuAUCCCUUCUdTdT | 900 |
| s | A-32225 | 295 | AAGuGGAAAuAGAcAccAAdTdT | 901 |
| as | A-32226 | 313 | UUGGUGUCuAUUUCcACUUdTdT | 902 |
| s | A-32227 | 299 | GGAAAuAGAcAccAAAucudTdT | 903 |
| as | A-32228 | 317 | AGAUUUGGUGUCuAUUUCCdTdT | 904 |
| s | A-32229 | 300 | GAAAuAGAcAccAAAucuudTdT | 905 |
| as | A-32230 | 318 | AAGAUUUGGUGUCuAUUUCdTdT | 906 |
| s | A-32231 | 303 | AuAGAcAccAAAucuuAcudTdT | 907 |
| as | A-32232 | 321 | AGuAAGAUUUGGUGUCuAUdTdT | 908 |
| s | A-32233 | 304 | uAGAcAccAAAucuuAcuGdTdT | 909 |
| as | A-32234 | 322 | cAGuAAGAUUUGGUGUCuAdTdT | 910 |
| s | A-32235 | 305 | AGAcAccAAAucuuAcuGGdTdT | 911 |
| as | A-32236 | 323 | CcAGuAAGAUUUGGUGUCUdTdT | 912 |
| s | A-32237 | 317 | uuAcuGGAAGGcAcuuGGcdTdT | 913 |
| as | A-32238 | 335 | GCcAAGUGCCUUCcAGuAAdTdT | 914 |
| s | A-32239 | 32 | uucucAucGucuGcuccucdTdT | 915 |
| as | A-32240 | 50 | GAGGAGcAGACGAUGAGAAdTdT | 916 |
| s | A-32241 | 322 | GGAAGGcAcuuGGcAucucdTdT | 917 |
| as | A-32242 | 340 | GAGAUGCcAAGUGCCUUCCdTdT | 918 |
| s | A-32243 | 326 | GGcAcuuGGcAucuccccAdTdT | 919 |
| as | A-32244 | 344 | UGGGGAGAUGCcAAGUGCCdTdT | 920 |
| s | A-32247 | 333 | GGcAucuccccAuuccAuGdTdT | 921 |
| as | A-32248 | 351 | cAUGGAAUGGGGAGAUGCCdTdT | 922 |
| s | A-32249 | 334 | GcAucuccccAuuccAuGAdTdT | 923 |
| as | A-32250 | 352 | UcAUGGAAUGGGGAGAUGCdTdT | 924 |
| s | A-32251 | 335 | cAucuccccAuuccAuGAGdTdT | 925 |
| as | A-32252 | 353 | CUcAUGGAAUGGGGAGAUGdTdT | 926 |
| s | A-32253 | 336 | AucuccccAuuccAuGAGcdTdT | 927 |
| as | A-32254 | 354 | GCUcAUGGAAUGGGGAGAUdTdT | 928 |
| s | A-32255 | 338 | cuccccAuuccAuGAGcAudTdT | 929 |
| as | A-32256 | 356 | AUGCUcAUGGAAUGGGGAGdTdT | 930 |
| s | A-32259 | 341 | cccAuuccAuGAGcAuGcAdTdT | 931 |
| as | A-32260 | 359 | UGcAUGCUcAUGGAAUGGGdTdT | 932 |
| s | A-32261 | 347 | ccAuGAGcAuGcAGAGGuGdTdT | 933 |
| as | A-32262 | 365 | cACCUCUGcAUGCUcAUGGdTdT | 934 |
| s | A-32263 | 352 | AGcAuGcAGAGGuGGuAuudTdT | 935 |
| as | A-32264 | 370 | AAuACcACCUCUGcAUGCUdTdT | 936 |
| s | A-32265 | 354 | cAuGcAGAGGuGGuAuucAdTdT | 937 |
| as | A-32266 | 372 | UGAAuACcACCUCUGcAUGdTdT | 938 |
| s | A-32267 | 355 | AuGcAGAGGuGGuAuucAcdTdT | 939 |
| as | A-32268 | 373 | GUGAAuACcACCUCUGcAUdTdT | 940 |
| s | A-32269 | 362 | GGuGGuAuucAcAGccAAcdTdT | 941 |
| as | A-32270 | 380 | GUUGGCUGUGAAuACcACCdTdT | 942 |
| s | A-32271 | 363 | GuGGuAuucAcAGccAAcGdTdT | 943 |
| as | A-32272 | 381 | CGUUGGCUGUGAAuACcACdTdT | 944 |
| s | A-32273 | 364 | uGGuAuucAcAGccAAcGAdTdT | 945 |
| as | A-32274 | 382 | UCGUUGGCUGUGAAuACcAdTdT | 946 |
| s | A-32275 | 365 | GGuAuucAcAGccAAcGAcdTdT | 947 |
| as | A-32276 | 383 | GUCGUUGGCUGUGAAuACCdTdT | 948 |
| s | A-32277 | 366 | GuAuucAcAGccAAcGAcudTdT | 949 |
| as | A-32278 | 384 | AGUCGUUGGCUGUGAAuACdTdT | 950 |
| s | A-32279 | 367 | uAuucAcAGccAAcGAcucdTdT | 951 |
| as | A-32280 | 385 | GAGUCGUUGGCUGUGAAuAdTdT | 952 |
| s | A-32281 | 370 | ucAcAGccAAcGAcuccGGdTdT | 953 |
| as | A-32282 | 388 | CCGGAGUCGUUGGCUGUGAdTdT | 954 |
| s | A-32283 | 390 | ccccGccGcuAcAccAuuGdTdT | 955 |
| as | A-32284 | 408 | cAAUGGUGuAGCGGCGGGGdTdT | 956 |
| s | A-32285 | 4 | GAAGuccAcucAuucuuGGdTdT | 957 |
| as | A-32286 | 22 | CcAAGAAUGAGUGGACUUCdTdT | 958 |
| s | A-32287 | 412 | cccuGcuGAGccccuAcucdTdT | 959 |
| as | A-32288 | 430 | GAGuAGGGGCUcAGcAGGGdTdT | 960 |
| s | A-32289 | 417 | cuGAGccccuAcuccuAuudTdT | 961 |
| as | A-32290 | 435 | AAuAGGAGuAGGGGCUcAGdTdT | 962 |
| s | A-32291 | 418 | uGAGccccuAcuccuAuucdTdT | 963 |
| as | A-32292 | 436 | GAAuAGGAGuAGGGGCUcAdTdT | 964 |
| s | A-32295 | 422 | ccccuAcuccuAuuccAccdTdT | 965 |
| as | A-32296 | 440 | GGUGGAAuAGGAGuAGGGGdTdT | 966 |
| s | A-32297 | 425 | cuAcuccuAuuccAccAcGdTdT | 967 |
| as | A-32298 | 443 | CGUGGUGGAAuAGGAGuAGdTdT | 968 |
| s | A-32299 | 426 | uAcuccuAuuccAccAcGGdTdT | 969 |
| as | A-32300 | 444 | CCGUGGUGGAAuAGGAGuAdTdT | 970 |
| s | A-32301 | 427 | AcuccuAuuccAccAcGGcdTdT | 971 |
| as | A-32302 | 445 | GCCGUGGUGGAAuAGGAGUdTdT | 972 |
| s | A-32303 | 429 | uccuAuuccAccAcGGcuGdTdT | 973 |
| as | A-32304 | 447 | cAGCCGUGGUGGAAuAGGAdTdT | 974 |
| s | A-32307 | 432 | uAuuccAccAcGGcuGucGdTdT | 975 |
| as | A-32308 | 450 | CGAcAGCCGUGGUGGAAuAdTdT | 976 |
| s | A-32309 | 433 | AuuccAccAcGGcuGucGudTdT | 977 |
| as | A-32310 | 451 | ACGAcAGCCGUGGUGGAAUdTdT | 978 |
| s | A-32311 | 437 | cAccAcGGcuGucGucAccdTdT | 979 |
| as | A-32312 | 455 | GGUGACGAcAGCCGUGGUGdTdT | 980 |
| s | A-32313 | 438 | AccAcGGcuGucGucAccAdTdT | 981 |
| as | A-32314 | 456 | UGGUGACGAcAGCCGUGGUdTdT | 982 |
| s | A-32315 | 439 | ccAcGGcuGucGucAccAAdTdT | 983 |
| as | A-32316 | 457 | UUGGUGACGAcAGCCGUGGdTdT | 984 |
| s | A-32319 | 441 | AcGGcuGucGucAccAAucdTdT | 985 |
| as | A-32320 | 459 | GAUUGGUGACGAcAGCCGUdTdT | 986 |
| s | A-32321 | 442 | cGGcuGucGucAccAAuccdTdT | 987 |
| as | A-32322 | 460 | GGAUUGGUGACGAcAGCCGdTdT | 988 |
| s | A-32323 | 449 | cGucAccAAucccAAGGAAdTdT | 989 |
| as | A-32324 | 467 | UUCCUUGGGAUUGGUGACGdTdT | 990 |
| s | A-32325 | 455 | cAAucccAAGGAAuGAGGGdTdT | 991 |
| as | A-32326 | 473 | CCCUcAUUCCUUGGGAUUGdTdT | 992 |
| s | A-32327 | 491 | ccuGAAGGAcGAGGGAuGGdTdT | 993 |
| as | A-32328 | 509 | CcAUCCCUCGUCCUUcAGGdTdT | 994 |
| s | A-32331 | 497 | GGAcGAGGGAuGGGAuuucdTdT | 995 |
| as | A-32332 | 515 | GAAAUCCcAUCCCUCGUCCdTdT | 996 |
| s | A-32333 | 5 | AAGuccAcucAuucuuGGcdTdT | 997 |
| as | A-32334 | 23 | GCcAAGAAUGAGUGGACUUdTdT | 998 |
| s | A-32335 | 508 | GGGAuuucAuGuAAccAAGdTdT | 999 |
| as | A-32336 | 526 | CUUGGUuAcAUGAAAUCCCdTdT | 1000 |
| s | A-32337 | 509 | GGAuuucAuGuAAccAAGAdTdT | 1001 |
| as | A-32338 | 527 | UCUUGGUuAcAUGAAAUCCdTdT | 1002 |
| s | A-32339 | 514 | ucAuGuAAccAAGAGuAuudTdT | 1003 |
| as | A-32340 | 532 | AAuACUCUUGGUuAcAUGAdTdT | 1004 |
| s | A-32341 | 516 | AuGuAAccAAGAGuAuuccdTdT | 1005 |
| as | A-32342 | 534 | GGAAuACUCUUGGUuAcAUdTdT | 1006 |
| s | A-32343 | 517 | uGuAAccAAGAGuAuuccAdTdT | 1007 |
| as | A-32344 | 535 | UGGAAuACUCUUGGUuAcAdTdT | 1008 |
| s | A-32345 | 518 | GuAAccAAGAGuAuuccAudTdT | 1009 |
| as | A-32346 | 536 | AUGGAAuACUCUUGGUuACdTdT | 1010 |
| s | A-32347 | 54 | uGccuuGcuGGAcuGGuAudTdT | 1011 |
| as | A-32348 | 72 | AuACcAGUCcAGcAAGGcAdTdT | 1012 |
| s | A-32349 | 543 | uAAAGcAGuGuuuucAccudTdT | 1013 |
| as | A-32350 | 561 | AGGUGAAAAcACUGCUUuAdTdT | 1014 |
| s | A-32351 | 55 | GccuuGcuGGAcuGGuAuudTdT | 1015 |
| as | A-32352 | 73 | AAuACcAGUCcAGcAAGGCdTdT | 1016 |
| s | A-32353 | 551 | uGuuuucAccucAuAuGcudTdT | 1017 |
| as | A-32354 | 569 | AGcAuAUGAGGUGAAAAcAdTdT | 1018 |
| s | A-32355 | 552 | GuuuucAccucAuAuGcuAdTdT | 1019 |
| as | A-32356 | 570 | uAGcAuAUGAGGUGAAAACdTdT | 1020 |
| s | A-32357 | 553 | uuuucAccucAuAuGcuAudTdT | 1021 |
| as | A-32358 | 571 | AuAGcAuAUGAGGUGAAAAdTdT | 1022 |
| s | A-32359 | 555 | uucAccucAuAuGcuAuGudTdT | 1023 |
| as | A-32360 | 573 | AcAuAGcAuAUGAGGUGAAdTdT | 1024 |
| s | A-32363 | 557 | cAccucAuAuGcuAuGuuAdTdT | 1025 |
| as | A-32364 | 575 | uAAcAuAGcAuAUGAGGUGdTdT | 1026 |
| s | A-32367 | 56 | ccuuGcuGGAcuGGuAuuudTdT | 1027 |
| as | A-32368 | 74 | AAAuACcAGUCcAGcAAGGdTdT | 1028 |
| s | A-32369 | 563 | AuAuGcuAuGuuAGAAGucdTdT | 1029 |
| as | A-32370 | 581 | GACUUCuAAcAuAGcAuAUdTdT | 1030 |
| s | A-32371 | 564 | uAuGcuAuGuuAGAAGuccdTdT | 1031 |
| as | A-32372 | 582 | GGACUUCuAAcAuAGcAuAdTdT | 1032 |
| s | A-32373 | 566 | uGcuAuGuuAGAAGuccAGdTdT | 1033 |
| as | A-32374 | 584 | CUGGACUUCuAAcAuAGcAdTdT | 1034 |
| s | A-32375 | 57 | cuuGcuGGAcuGGuAuuuGdTdT | 1035 |
| as | A-32376 | 75 | cAAAuACcAGUCcAGcAAGdTdT | 1036 |
| s | A-32379 | 578 | AGuccAGGcAGAGAcAAuAdTdT | 1037 |
| as | A-32380 | 596 | uAUUGUCUCUGCCUGGACUdTdT | 1038 |
| s | A-32381 | 580 | uccAGGcAGAGAcAAuAAAdTdT | 1039 |
| as | A-32382 | 598 | UUuAUUGUCUCUGCCUGGAdTdT | 1040 |
| s | A-32383 | 607 | GuGAAAGGcAcuuuucAuudTdT | 1041 |
| as | A-32384 | 625 | AAUGAAAAGUGCCUUUcACdTdT | 1042 |
| s | A-32385 | 62 | uGGAcuGGuAuuuGuGucudTdT | 1043 |
| as | A-32386 | 80 | AGAcAcAAAuACcAGUCcAdTdT | 1044 |
| s | A-32387 | 77 | GucuGAGGcuGGcccuAcGdTdT | 1045 |
| as | A-32388 | 95 | CGuAGGGCcAGCCUcAGACdTdT | 1046 |
| s | A-32391 | 79 | cuGAGGcuGGcccuAcGGGdTdT | 1047 |
| as | A-32392 | 97 | CCCGuAGGGCcAGCCUcAGdTdT | 1048 |
| s | A-32393 | 81 | GAGGcuGGcccuAcGGGcAdTdT | 1049 |
| as | A-32394 | 99 | UGCCCGuAGGGCcAGCCUCdTdT | 1050 |
| s | A-32395 | 82 | AGGcuGGcccuAcGGGcAcdTdT | 1051 |
| as | A-32396 | 100 | GUGCCCGuAGGGCcAGCCUdTdT | 1052 |
| s | A-32397 | 84 | GcuGGcccuAcGGGcAccGdTdT | 1053 |
| as | A-32398 | 102 | CGGUGCCCGuAGGGCcAGCdTdT | 1054 |
| s | A-32399 | 85 | cuGGcccuAcGGGcAccGGdTdT | 1055 |
| as | A-32400 | 103 | CCGGUGCCCGuAGGGCcAGdTdT | 1056 |
| s | A-32401 | 87 | GGcccuAcGGGcAccGGuGdTdT | 1057 |
| as | A-32402 | 105 | cACCGGUGCCCGuAGGGCCdTdT | 1058 |
| s | A-32403 | 9 | ccAcucAuucuuGGcAGGAdTdT | 1059 |
| as | A-32404 | 27 | UCCUGCcAAGAAUGAGUGGdTdT | 1060 |
| s | A-32405 | 90 | ccuAcGGGcAccGGuGAAudTdT | 1061 |
| as | A-32406 | 108 | AUUcACCGGUGCCCGuAGGdTdT | 1062 |
| s | A-32407 | 91 | cuAcGGGcAccGGuGAAucdTdT | 1063 |
| as | A-32408 | 109 | GAUUcACCGGUGCCCGuAGdTdT | 1064 |
| s | A-32409 | 92 | uAcGGGcAccGGuGAAuccdTdT | 1065 |
| as | A-32410 | 110 | GGAUUcACCGGUGCCCGuAdTdT | 1066 |
| s | A-32411 | 93 | AcGGGcAccGGuGAAuccAdTdT | 1067 |
| as | A-32412 | 111 | UGGAUUcACCGGUGCCCGUdTdT | 1068 |
| s | A-32415 | 97 | GcAccGGuGAAuccAAGuGdTdT | 1069 |
| as | A-32416 | 115 | cACUUGGAUUcACCGGUGCdTdT | 1070 |
| s | A-32417 | 98 | cAccGGuGAAuccAAGuGudTdT | 1071 |
| as | A-32418 | 116 | AcACUUGGAUUcACCGGUGdTdT | 1072 |
| s | A-32419 | 167 | uGuGGccAuGcAuGuGuucdTdT | 1073 |
| as | A-32420 | 185 | GAAcAcAUGcAUGGCcAcAdTdT | 1074 |
| s | A-32421 | 168 | GuGGccAuGcAuGuGuucAdTdT | 1075 |
| as | A-32422 | 186 | UGAAcAcAUGcAUGGCcACdTdT | 1076 |
| s | A-32423 | 171 | GccAuGcAuGuGuucAGAAdTdT | 1077 |
| as | A-32424 | 189 | UUCUGAAcAcAUGcAUGGCdTdT | 1078 |
| s | A-32427 | 432 | uAuuccAccAcGGcuGucAdTdT | 1079 |
| as | A-32428 | 449 | UGAcAGCCGUGGUGGAAuAdTdT | 1080 |
| s | A-32429 | 447 | GucAucAccAAucccAAGGdTdT | 1081 |
| as | A-32430 | 465 | CCUUGGGAUUGGUGAUGACdTdT | 1082 |
| s | A-32159 | 115 | GuccucuGAuGGucAAAGudTdT | 1083 |
| as | A-32160 | 133 | ACUUUGACcAUcAGAGGACdTdT | 1084 |
| s | A-32161 | 122 | GAuGGucAAAGuucuAGAudTdT | 1085 |
| as | A-32162 | 140 | AUCuAGAACUUUGACcAUCdTdT | 1086 |
| s | A-32173 | 139 | AuGcuGuccGAGGcAGuccdTdT | 1087 |
| as | A-32174 | 157 | GGACUGCCUCGGAcAGcAUdTdT | 1088 |
| s | A-32185 | 172 | ccGuGcAuGuGuucAGAAAdTdT | 1089 |
| as | A-32186 | 190 | UUUCUGAAcAcAUGcACGGdTdT | 1090 |
| s | A-32197 | 238 | AGucuGGAGAGcuGcAuGGdTdT | 1091 |
| as | A-32198 | 256 | CcAUGcAGCUCUCcAGACUdTdT | 1092 |
| s | A-32209 | 252 | cAuGGGcucAcAAcuGAGGdTdT | 1093 |
| as | A-32210 | 270 | CCUcAGUUGUGAGCCcAUGdTdT | 1094 |
| s | A-32245 | 33 | ucucAucGucuGcuccuccdTdT | 1095 |
| as | A-32246 | 51 | GGAGGAGcAGACGAUGAGAdTdT | 1096 |
| s | A-32257 | 340 | ccccAuuccAuGAGcAuGcdTdT | 1097 |
| as | A-32258 | 358 | GcAUGCUcAUGGAAUGGGGdTdT | 1098 |
| s | A-32293 | 421 | GccccuAcuccuAuuccAcdTdT | 1099 |
| as | A-32294 | 439 | GUGGAAuAGGAGuAGGGGCdTdT | 1100 |
| s | A-32305 | 431 | cuAuuccAccAcGGcuGucdTdT | 1101 |
| as | A-32306 | 449 | GAcAGCCGUGGUGGAAuAGdTdT | 1102 |
| s | A-32317 | 440 | cAcGGcuGucGucAccAAudTdT | 1103 |
| as | A-32318 | 458 | AUUGGUGACGAcAGCCGUGdTdT | 1104 |
| s | A-32329 | 496 | AGGAcGAGGGAuGGGAuuudTdT | 1105 |
| as | A-32330 | 514 | AAAUCCcAUCCCUCGUCCUdTdT | 1106 |
| s | A-32361 | 556 | ucAccucAuAuGcuAuGuudTdT | 1107 |
| as | A-32362 | 574 | AAcAuAGcAuAUGAGGUGAdTdT | 1108 |
| s | A-32365 | 559 | ccucAuAuGcuAuGuuAGAdTdT | 1109 |
| as | A-32366 | 577 | UCuAAcAuAGcAuAUGAGGdTdT | 1110 |
| s | A-32377 | 570 | AuGuuAGAAGuccAGGcAGdTdT | 1111 |
| as | A-32378 | 588 | CUGCCUGGACUUCuAAcAUdTdT | 1112 |
| s | A-32389 | 78 | ucuGAGGcuGGcccuAcGGdTdT | 1113 |
| as | A-32390 | 96 | CCGuAGGGCcAGCCUcAGAdTdT | 1114 |
| s | A-32401 | 87 | GGcccuAcGGGcAccGGuGdTdT | 1115 |
| as | A-32402 | 105 | cACCGGUGCCCGuAGGGCCdTdT | 1116 |
| s | A-32413 | 95 | GGGcAccGGuGAAuccAAGdTdT | 1117 |
| as | A-32414 | 113 | CUUGGAUUcACCGGUGCCCdTdT | 1118 |
| s | A-32425 | 167 | ccAuGcAuGuGuucAGAAAdTdT | 1119 |
| as | A-32426 | 185 | UUUCUGAAcAcAUGcAUGGdTdT | 1120 |

See Table 2 for duplex #.
Strand: s = sense, as = antisense;
Position: position of 5′ base on transcript (NM_000371.2, SEQ ID NO: 1329)

TABLE 5
Identification numbers for rat TTR dsRNAs
See Table 7 for sequences.

| Duplex # | Sense Oligo # | Antisense Oligo # |
|---|---|---|
| AD-18529 | A-32745 | A-32746 |
| AD-18530 | A-32747 | A-32748 |
| AD-18531 | A-32749 | A-32750 |
| AD-18532 | A-32751 | A-32752 |
| AD-18533 | A-32753 | A-32754 |
| AD-18534 | A-32755 | A-32756 |
| AD-18535 | A-32757 | A-32758 |
| AD-18536 | A-32759 | A-32760 |
| AD-18537 | A-32761 | A-32762 |
| AD-18538 | A-32763 | A-32764 |
| AD-18539 | A-32159 | A-32160 |
| AD-18540 | A-32765 | A-32766 |
| AD-18541 | A-32767 | A-32768 |
| AD-18542 | A-32769 | A-32770 |
| AD-18543 | A-32771 | A-32772 |
| AD-18544 | A-32773 | A-32774 |
| AD-18545 | A-32775 | A-32776 |
| AD-18546 | A-32777 | A-32778 |
| AD-18547 | A-32779 | A-32780 |
| AD-18548 | A-32781 | A-32782 |
| AD-18549 | A-32783 | A-32784 |
| AD-18550 | A-32785 | A-32786 |
| AD-18551 | A-32787 | A-32788 |
| AD-18552 | A-32791 | A-32792 |
| AD-18553 | A-32793 | A-32794 |
| AD-18554 | A-32795 | A-32796 |

TABLE 6A
Sense and antisense strand sequences for rat TTR dsRNAs

| | | | SEQ | Sequence with 3′ | SEQ |
|---|---|---|---|---|---|
| | | | ID | dinucleotide overhang | ID |
| Strand | Position | Sequence (5′ to 3′) | NO: | (5′ to 3′) | NO: |
| s | 115 | GUCCUCUGAUGGUCAAAGU | 1121 | GUCCUCUGAUGGUCAAAGUNN | 1173 |
| as | 133 | ACUUUGACCAUCAGAGGAC | 1122 | ACUUUGACCAUCAGAGGACNN | 1174 |
| s | 537 | UUCUUGCUCUAUAAACCGU | 1123 | UUCUUGCUCUAUAAACCGUNN | 1175 |
| as | 555 | ACGGUUUAUAGAGCAAGAA | 1124 | ACGGUUUAUAGAGCAAGAANN | 1176 |
| s | 543 | CUCUAUAAACCGUGUUAGC | 1125 | CUCUAUAAACCGUGUUAGCNN | 1177 |
| as | 561 | GCUAACACGGUUUAUAGAG | 1126 | GCUAACACGGUUUAUAGAGNN | 1178 |
| s | 392 | UCGCCACUACACCAUCGCA | 1127 | UCGCCACUACACCAUCGCANN | 1179 |
| as | 410 | UGCGAUGGUGUAGUGGCGA | 1128 | UGCGAUGGUGUAGUGGCGANN | 1180 |
| s | 538 | UCUUGCUCUAUAAACCGUG | 1129 | UCUUGCUCUAUAAACCGUGNN | 1181 |
| as | 556 | CACGGUUUAUAGAGCAAGA | 1130 | CACGGUUUAUAGAGCAAGANN | 1182 |
| s | 541 | UGCUCUAUAAACCGUGUUA | 1131 | UGCUCUAUAAACCGUGUUANN | 1183 |
| as | 559 | UAACACGGUUUAUAGAGCA | 1132 | UAACACGGUUUAUAGAGCANN | 1184 |
| s | 532 | CAGUGUUCUUGCUCUAUAA | 1133 | CAGUGUUCUUGCUCUAUAANN | 1185 |
| as | 550 | UUAUAGAGCAAGAACACUG | 1134 | UUAUAGAGCAAGAACACUGNN | 1186 |
| s | 542 | GCUCUAUAAACCGUGUUAG | 1135 | GCUCUAUAAACCGUGUUAGNN | 1187 |
| as | 560 | CUAACACGGUUUAUAGAGC | 1136 | CUAACACGGUUUAUAGAGCNN | 1188 |
| s | 134 | CCUGGAUGCUGUCCGAGGC | 1137 | CCUGGAUGCUGUCCGAGGCNN | 1189 |
| as | 152 | GCCUCGGACAGCAUCCAGG | 1138 | GCCUCGGACAGCAUCCAGGNN | 1190 |
| s | 119 | UCUGAUGGUCAAAGUCCUG | 1139 | UCUGAUGGUCAAAGUCCUGNN | 1191 |
| as | 137 | CAGGACUUUGACCAUCAGA | 1140 | CAGGACUUUGACCAUCAGANN | 1192 |
| s | 241 | CUGGAGAGCUGCACGGGCU | 1141 | CUGGAGAGCUGCACGGGCUNN | 1193 |
| as | 259 | AGCCCGUGCAGCUCUCCAG | 1142 | AGCCCGUGCAGCUCUCCAGNN | 1194 |
| s | 544 | UCUAUAAACCGUGUUAGCA | 1143 | UCUAUAAACCGUGUUAGCANN | 1195 |
| as | 562 | UGCUAACACGGUUUAUAGA | 1144 | UGCUAACACGGUUUAUAGANN | 1196 |
| s | 530 | AACAGUGUUCUUGCUCUAU | 1145 | AACAGUGUUCUUGCUCUAUNN | 1197 |
| as | 548 | AUAGAGCAAGAACACUGUU | 1146 | AUAGAGCAAGAACACUGUUNN | 1198 |
| s | 118 | CUCUGAUGGUCAAAGUCCU | 1147 | CUCUGAUGGUCAAAGUCCUNN | 1199 |
| as | 136 | AGGACUUUGACCAUCAGAG | 1148 | AGGACUUUGACCAUCAGAGNN | 1200 |
| s | 140 | UGCUGUCCGAGGCAGCCCU | 1149 | UGCUGUCCGAGGCAGCCCUNN | 1201 |
| as | 158 | AGGGCUGCCUCGGACAGCA | 1150 | AGGGCUGCCUCGGACAGCANN | 1202 |
| s | 239 | GUCUGGAGAGCUGCACGGG | 1151 | GUCUGGAGAGCUGCACGGGNN | 1203 |
| as | 257 | CCCGUGCAGCUCUCCAGAC | 1152 | CCCGUGCAGCUCUCCAGACNN | 1204 |
| s | 531 | ACAGUGUUCUUGCUCUAUA | 1153 | ACAGUGUUCUUGCUCUAUANN | 1205 |
| as | 549 | UAUAGAGCAAGAACACUGU | 1154 | UAUAGAGCAAGAACACUGUNN | 1206 |
| s | 117 | CCUCUGAUGGUCAAAGUCC | 1155 | CCUCUGAUGGUCAAAGUCCNN | 1207 |
| as | 135 | GGACUUUGACCAUCAGAGG | 1156 | GGACUUUGACCAUCAGAGGNN | 1208 |
| s | 131 | AGUCCUGGAUGCUGUCCGA | 1157 | AGUCCUGGAUGCUGUCCGANN | 1209 |
| as | 149 | UCGGACAGCAUCCAGGACU | 1158 | UCGGACAGCAUCCAGGACUNN | 1210 |
| s | 217 | UUGCCUCUGGGAAGACCGC | 1159 | UUGCCUCUGGGAAGACCGCNN | 1211 |
| as | 235 | GCGGUCUUCCCAGAGGCAA | 1160 | GCGGUCUUCCCAGAGGCAANN | 1212 |
| s | 242 | UGGAGAGCUGCACGGGCUC | 1161 | UGGAGAGCUGCACGGGCUCNN | 1213 |
| as | 260 | GAGCCCGUGCAGCUCUCCA | 1162 | GAGCCCGUGCAGCUCUCCANN | 1214 |
| s | 244 | GAGAGCUGCACGGGCUCAC | 1163 | GAGAGCUGCACGGGCUCACNN | 1215 |
| as | 262 | GUGAGCCCGUGCAGCUCUC | 1164 | GUGAGCCCGUGCAGCUCUCNN | 1216 |
| s | 246 | GAGCUGCACGGGCUCACCA | 1165 | GAGCUGCACGGGCUCACCANN | 1217 |
| as | 264 | UGGUGAGCCCGUGCAGCUC | 1166 | UGGUGAGCCCGUGCAGCUCNN | 1218 |
| s | 399 | UACACCAUCGCAGCCCUGC | 1167 | UACACCAUCGCAGCCCUGCNN | 1219 |
| as | 417 | GCAGGGCUGCGAUGGUGUA | 1168 | GCAGGGCUGCGAUGGUGUANN | 1220 |
| s | 132 | GUCCUGGAUGCUGUCCGAG | 1169 | GUCCUGGAUGCUGUCCGAGNN | 1221 |
| as | 150 | CUCGGACAGCAUCCAGGAC | 1170 | CUCGGACAGCAUCCAGGACNN | 1222 |
| s | 245 | AGAGCUGCACGGGCUCACC | 1171 | AGAGCUGCACGGGCUCACCNN | 1223 |
| as | 263 | GGUGAGCCCGUGCAGCUCU | 1172 | GGUGAGCCCGUGCAGCUCUNN | 1224 |

Strand: s = sense; as = antisense;
Position: position of 5′ base on transcript (NM_012681.1, SEQ ID NO: 1330)

TABLE 6B
Sense and antisense strand sequences for rat
TTR dsRNAs

| | | Sequence with | SEQ |
|---|---|---|---|
| | | 3′deoxythimidine | ID |
| Strand | Position | overhang (5′ to 3′) | NO: |
| s | 115 | GUCCUCUGAUGGUCAAAGUdTdT | 1225 |
| as | 133 | ACUUUGACCAUCAGAGGACdTdT | 1226 |
| s | 537 | UUCUUGCUCUAUAAACCGUdTdT | 1227 |
| as | 555 | ACGGUUUAUAGAGCAAGAAdTdT | 1228 |
| s | 543 | CUCUAUAAACCGUGUUAGCdTdT | 1229 |
| as | 561 | GCUAACACGGUUUAUAGAGdTdT | 1230 |
| s | 392 | UCGCCACUACACCAUCGCAdTdT | 1231 |
| as | 410 | UGCGAUGGUGUAGUGGCGAdTdT | 1232 |
| s | 538 | UCUUGCUCUAUAAACCGUGdTdT | 1233 |
| as | 556 | CACGGUUUAUAGAGCAAGAdTdT | 1234 |
| s | 541 | UGCUCUAUAAACCGUGUUAdTdT | 1235 |
| as | 559 | UAACACGGUUUAUAGAGCAdTdT | 1236 |
| s | 532 | CAGUGUUCUUGCUCUAUAAdTdT | 1237 |
| as | 550 | UUAUAGAGCAAGAACACUGdTdT | 1238 |
| s | 542 | GCUCUAUAAACCGUGUUAGdTdT | 1239 |
| as | 560 | CUAACACGGUUUAUAGAGCdTdT | 1240 |
| s | 134 | CCUGGAUGCUGUCCGAGGCdTdT | 1241 |
| as | 152 | GCCUCGGACAGCAUCCAGGdTdT | 1242 |
| s | 119 | UCUGAUGGUCAAAGUCCUGdTdT | 1243 |
| as | 137 | CAGGACUUUGACCAUCAGAdTdT | 1244 |
| s | 241 | CUGGAGAGCUGCACGGGCUdTdT | 1245 |
| as | 259 | AGCCCGUGCAGCUCUCCAGdTdT | 1246 |
| s | 544 | UCUAUAAACCGUGUUAGCAdTdT | 1247 |
| as | 562 | UGCUAACACGGUUUAUAGAdTdT | 1248 |
| s | 530 | AACAGUGUUCUUGCUCUAUdTdT | 1249 |
| as | 548 | AUAGAGCAAGAACACUGUUdTdT | 1250 |
| s | 118 | CUCUGAUGGUCAAAGUCCUdTdT | 1251 |
| as | 136 | AGGACUUUGACCAUCAGAGdTdT | 1252 |
| s | 140 | UGCUGUCCGAGGCAGCCCUdTdT | 1253 |
| as | 158 | AGGGCUGCCUCGGACAGCAdTdT | 1254 |
| s | 239 | GUCUGGAGAGCUGCACGGGdTdT | 1255 |
| as | 257 | CCCGUGCAGCUCUCCAGACdTdT | 1256 |
| s | 531 | ACAGUGUUCUUGCUCUAUAdTdT | 1257 |
| as | 549 | UAUAGAGCAAGAACACUGUdTdT | 1258 |
| s | 117 | CCUCUGAUGGUCAAAGUCCdTdT | 1259 |
| as | 135 | GGACUUUGACCAUCAGAGGdTdT | 1260 |
| s | 131 | AGUCCUGGAUGCUGUCCGAdTdT | 1261 |
| as | 149 | UCGGACAGCAUCCAGGACUdTdT | 1262 |
| s | 217 | UUGCCUCUGGGAAGACCGCdTdT | 1263 |
| as | 235 | GCGGUCUUCCCAGAGGCAAdTdT | 1264 |
| s | 242 | UGGAGAGCUGCACGGGCUCdTdT | 1265 |
| as | 260 | GAGCCCGUGCAGCUCUCCAdTdT | 1266 |
| s | 244 | GAGAGCUGCACGGGCUCACdTdT | 1267 |
| as | 262 | GUGAGCCCGUGCAGCUCUCdTdT | 1268 |
| s | 246 | GAGCUGCACGGGCUCACCAdTdT | 1269 |
| as | 264 | UGGUGAGCCCGUGCAGCUCdTdT | 1270 |
| s | 399 | UACACCAUCGCAGCCCUGCdTdT | 1271 |
| as | 417 | GCAGGGCUGCGAUGGUGUAdTdT | 1272 |
| s | 132 | GUCCUGGAUGCUGUCCGAGdTdT | 1273 |
| as | 150 | CUCGGACAGCAUCCAGGACdTdT | 1274 |
| s | 245 | AGAGCUGCACGGGCUCACCdTdT | 1275 |
| as | 263 | GGUGAGCCCGUGCAGCUCUdTdT | 1276 |

Strand: s = sense; as = antisense;
Position: position of 5′ base on transcript (NM_012681.1, SEQ ID NO. 1330)

TABLE 7
Chemically modified sense and antisense strand sequences for
rat TTR dsRNAs

| Strand | Oligo # | Position | Sequence (5′ to 3′) | SEQ ID NO: |
|---|---|---|---|---|
| s | A-32159 | 115 | GuccucuGAuGGucAAAGudTdT | 1277 |
| as | A-32160 | 133 | ACUUUGACcAUcAGAGGACdTdT | 1278 |
| s | A-32745 | 537 | uucuuGcucuAuAAAccGudTdT | 1279 |
| as | A-32746 | 555 | ACGGUUuAuAGAGcAAGAAdTdT | 1280 |
| s | A-32747 | 543 | cucuAuAAAccGuGuuAGcdTdT | 1281 |
| as | A-32748 | 561 | GCuAAcACGGUUuAuAGAGdTdT | 1282 |
| s | A-32749 | 392 | ucGccAcuAcAccAucGcAdTdT | 1283 |
| as | A-32750 | 410 | UGCGAUGGUGuAGUGGCGAdTdT | 1284 |
| s | A-32751 | 538 | ucuuGcucuAuAAAccGuGdTdT | 1285 |
| as | A-32752 | 556 | cACGGUUuAuAGAGcAAGAdTdT | 1286 |
| s | A-32753 | 541 | uGcucuAuAAAccGuGuuAdTdT | 1287 |
| as | A-32754 | 559 | uAAcACGGUUuAuAGAGcAdTdT | 1288 |
| s | A-32755 | 532 | cAGuGuucuuGcucuAuAAdTdT | 1289 |
| as | A-32756 | 550 | UuAuAGAGcAAGAAcACUGdTdT | 1290 |
| s | A-32757 | 542 | GcucuAuAAAccGuGuuAGdTdT | 1291 |
| as | A-32758 | 560 | CuAAcACGGUUuAuAGAGCdTdT | 1292 |
| s | A-32759 | 134 | ccuGGAuGcuGuccGAGGcdTdT | 1293 |
| as | A-32760 | 152 | GCCUCGGAcAGcAUCcAGGdTdT | 1294 |
| s | A-32761 | 119 | ucuGAuGGucAAAGuccuGdTdT | 1295 |
| as | A-32762 | 137 | cAGGACUUUGACcAUcAGAdTdT | 1296 |
| s | A-32763 | 241 | cuGGAGAGcuGcAcGGGcudTdT | 1297 |
| as | A-32764 | 259 | AGCCCGUGcAGCUCUCcAGdTdT | 1298 |
| s | A-32765 | 544 | ucuAuAAAccGuGuuAGcAdTdT | 1299 |
| as | A-32766 | 562 | UGCuAAcACGGUUuAuAGAdTdT | 1300 |
| s | A-32767 | 530 | AAcAGuGuucuuGcucuAudTdT | 1301 |
| as | A-32768 | 548 | AuAGAGcAAGAAcACUGUUdTdT | 1302 |
| s | A-32769 | 118 | cucuGAuGGucAAAGuccudTdT | 1303 |
| as | A-32770 | 136 | AGGACUUUGACcAUcAGAGdTdT | 1304 |
| s | A-32771 | 140 | uGcuGuccGAGGcAGcccudTdT | 1305 |
| as | A-32772 | 158 | AGGGCUGCCUCGGAcAGcAdTdT | 1306 |
| s | A-32773 | 239 | GucuGGAGAGcuGcAcGGGdTdT | 1307 |
| as | A-32774 | 257 | CCCGUGcAGCUCUCcAGACdTdT | 1308 |
| s | A-32775 | 531 | AcAGuGuucuuGcucuAuAdTdT | 1309 |
| as | A-32776 | 549 | uAuAGAGcAAGAAcACUGUdTdT | 1310 |
| s | A-32777 | 117 | ccucuGAuGGucAAAGuccdTdT | 1311 |
| as | A-32778 | 135 | GGACUUUGACcAUcAGAGGdTdT | 1312 |
| s | A-32779 | 131 | AGuccuGGAuGcuGuccGAdTdT | 1313 |
| as | A-32780 | 149 | UCGGAcAGcAUCcAGGACUdTdT | 1314 |
| s | A-32781 | 217 | uuGccucuGGGAAGAccGcdTdT | 1315 |
| as | A-32782 | 235 | GCGGUCUUCCcAGAGGcAAdTdT | 1316 |
| s | A-32783 | 242 | uGGAGAGcuGcAcGGGcucdTdT | 1317 |
| as | A-32784 | 260 | GAGCCCGUGcAGCUCUCcAdTdT | 1318 |
| s | A-32785 | 244 | GAGAGcuGcAcGGGcucAcdTdT | 1319 |
| as | A-32786 | 262 | GUGAGCCCGUGcAGCUCUCdTdT | 1320 |
| s | A-32787 | 246 | GAGcuGcAcGGGcucAccAdTdT | 1321 |
| as | A-32788 | 264 | UGGUGAGCCCGUGcAGCUCdTdT | 1322 |
| s | A-32791 | 399 | uAcAccAucGcAGcccuGcdTdT | 1323 |
| as | A-32792 | 417 | GcAGGGCUGCGAUGGUGuAdTdT | 1324 |
| s | A-32793 | 132 | GuccuGGAuGcuGuccGAGdTdT | 1325 |
| as | A-32794 | 150 | CUCGGAcAGcAUCcAGGACdTdT | 1326 |
| s | A-32795 | 245 | AGAGcuGcAcGGGcucAccdTdT | 1327 |
| as | A-32796 | 263 | GGUGAGCCCGUGcAGCUCUdTdT | 1328 |

See Table 5 for duplex #(dsRNA name).
Strand: s = sense; as = antisense;
Position: position of 5′ base on transcript (NM_012681.1, SEQ ID NO: 1330)

[0283] Synthesis of TTR Sequences

[0284] TTR sequences were synthesized on MerMade 192 synthesizer at 1 μmol scale. For all the sequences in the list, ‘endolight’ chemistry was applied as detailed below.
[0285] All pyrimidines (cytosine and uridine) in the sense strand were replaced with corresponding 2′-O-Methyl bases (2′ 0-Methyl C and 2′-O-Methyl U)
[0286] In the antisense strand, pyrimidines adjacent to (towards 5′ position) ribo A nucleoside were replaced with their corresponding 2-O-Methyl nucleosides
[0287] A two base dTdT extension at 3′ end of both sense and antisense sequences was introduced
[0288] The sequence file was converted to a text file to make it compatible for loading in the MerMade 192 synthesis software

[0289] The synthesis of TTR sequences used solid supported oligonucleotide synthesis using phosphoramidite chemistry. The synthesis of the above sequences was performed at 1 um scale in 96 well plates. The amidite solutions were prepared at 0.1M concentration and ethyl thio tetrazole (0.6M in Acetonitrile) was used as activator.

[0290] The synthesized sequences were cleaved and deprotected in 96 well plates, using methylamine in the first step and triethylamine.3HF in the second step. The crude sequences thus obtained were precipitated using acetone: ethanol mix and the pellet were re-suspended in 0.5M sodium acetate buffer. Samples from each sequence were analyzed by LC-MS and the resulting mass data confirmed the identity of the sequences. A selected set of samples were also analyzed by IEX chromatography.

[0291] The next step in the process was purification. All sequences were purified on an AKTA explorer purification system using Source 15Q column. A single peak corresponding to the full length sequence was collected in the eluent and was subsequently analyzed for purity by ion exchange chromatography.

[0292] The purified sequences were desalted on a Sephadex G25 column using AKTA purifier. The desalted TTR sequences were analyzed for concentration and purity. The single strands were then annealed to form TTR-dsRNA.

### Example 2B: In Vitro Screening of TTR siRNAs for mRNA Suppression

[0293] Human TTR targeting dsRNAs (Table 2) were assayed for inhibition of endogenous TTR expression in HepG2 and Hep3B cells, using qPCR (real time PCR) and bDNA (branched DNA) assays to quantify TTR mRNA. Rodent TTR targeting dsRNA (Table 5) were synthesized and assayed for inhibition of endogenous TTR expression using bDNA assays in H.4.II.E cells. Results from single dose assays were used to select a subset of TTR dsRNA duplexes for dose response experiments to calculate IC50's. IC50 results were used to select TTR dsRNAs for further testing.

[0294] Cell Culture and Transfections:

[0295] The hepatocyte cell lines HepG2, Hep3B and H.4.II.E cells (ATCC, Manassas, VA) were grown to near confluence at 37° C. in an atmosphere of 5% CO₂ in Dulbecco's modified Eagle's medium (ATCC) supplemented with 10% FBS, streptomycin, and glutamine (ATCC) before being released from the plate by trypsinization. H.4.II.E cells were also grown in Earle's minimal essential medium. Reverse transfection was carried out by adding 5 μl of Opti-MEM to 5 μl of siRNA duplexes per well into a 96-well plate along with 10 μl of Opti-MEM plus 0.2 μl of Lipofectamine RNAiMax per well (Invitrogen, Carlsbad CA. cat #13778-150) and incubated at room temperature for 15 minutes. 80 μl of complete growth media without antibiotics containing 4×10⁴ (HepG2), 2×10⁴ (Hep3B) or 2×10⁴ (H.4.II.E) cells were then added. Cells were incubated for 24 hours prior to RNA purification. Single dose experiments were performed at 10 nM final duplex concentration and dose response experiments were done with 10, 1, 0.5, 0.1, 0.05, 0.01, 0.005, 0.001, 0.0005, 0.0001, 0.00005, 0.00001 nM.

[0296] Total RNA Isolation Using MagMAX-96 Total RNA Isolation Kit (Applied Biosystems, Foster City CA, Part #: AM1830):

[0297] Cells were harvested and lysed in 140 μl of Lysis/Binding Solution then mixed for 1 minute at 850 rpm using and Eppendorf Thermomixer (the mixing speed was the same throughout the process). Twenty micro liters of magnetic beads were added into cell-lysate and mixed for 5 minutes. Magnetic beads were captured using magnetic stand and the supernatant was removed without disturbing the beads. After removing supernatant, magnetic beads were washed with Wash Solution 1 (isopropanol added) and mixed for 1 minute. Beads were captured again and supernatant removed. Beads were then washed with 150 μl Wash Solution 2 (Ethanol added), captured and supernatant was removed. 50 μl of DNase mixture (MagMax turbo DNase Buffer and Turbo DNase) was then added to the beads and they were mixed for 10 to 15 minutes. After mixing, 100 μl of RNA Rebinding Solution was added and mixed for 3 minutes. Supernatant was removed and magnetic beads were washed again with 150 μl Wash Solution 2 and mixed for 1 minute and supernatant was removed completely. The magnetic beads were mixed for 2 minutes to dry before RNA it was eluted with 50 μl of water.

[0298] cDNA Synthesis Using ABI High Capacity cDNA Reverse Transcription Kit (Applied Biosystems, Foster City, CA, Cat #4368813):

[0299] A master mix of 2 μl 10×Buffer, 0.8 μl 25×dNTPs, 2 μl Random primers, 1 μl Reverse Transcriptase, 1 μl RNase inhibitor and 3.2 μl of H2O per reaction were added into 10 μl total RNA. cDNA was generated using a Bio-Rad C-1000 or S-1000 thermal cycler (Hercules, CA) through the following steps: 25° C. 10 min, 37° C. 120 min, 85° C. 5 sec, 4° C. hold.

[0300] Real time PCR:

[0301] 2 μl of cDNA was added to a master mix of 1 μl 18S TaqMan Probe (Applied Biosystems Cat #4319413E), 1 μl TTR TaqMan probe (Applied Biosystems cat #HS00174914 M1) and 10 μl TaqMan Universal PCR Master Mix (Applied Biosystems Cat #4324018) per well in a MicroAmp Optical 96 well plate (Applied Biosystems cat #4326659). Real time PCR was done in an ABI 7000 Prism or an ABI 7900HT Real Time PCR system (Applied Biosystems) using the ΔΔ Ct(RQ) assay. All reactions were done in triplicate.

[0302] Real time data were analyzed using the ΔΔ Ct method and normalized to assays performed from cells transfected with 10 nM BlockIT fluorescent Oligo (Invitrogen Cat #2013) or 10 nM AD-1955 (a control duplex that targets the non-mammalian luciferase gene) to calculate fold change.

[0303] Branched DNA Assays—QuantiGene 1.0 (Panomics, Fremont, CA. Cat #: QG0004)—Used to Screen Rodent Specific Duplexes

[0304] H.4.II.E cells (ATCC) were transfected with 10 nM siRNA. After removing media, H.4.II.E were lysed in 100 μl of Diluted Lysis Mixture (a mixture of 1 volume of Lysis mixture, 2 volume of nuclease-free water and 10 ul of Proteinase-K per ml for the final concentration of 20 mg/ml) then incubated at 65° C. for 35 minutes. Then, 80 μl of Working Probe Set (a mixture of TTR or GAPDH probe) and 20 μl of cell-lysate were added into the Capture Plate. Capture Plates were incubated at 53° C.±1° C. overnight (approximately 16-20 hrs). Capture Plates were washed 3 times with 1×Wash Buffer (a mixture of nuclease-free water, Buffer Component 1 and Wash Buffer Component 2), then dried by centrifuging for 1 minute at 1000 rpm. 100 μl of Amplifier Working Reagent was added into the Capture Plate, which was then sealed and incubated for 1 hour at 46° C.±1° C. Wash and dry steps were repeated after 1 hour of incubation and 100 μl of Label Solution Reagent was added. The plate was then washed, dried and 100 μl Substrate (a mixture of Lithium Lauryl Sulfate and Substrate solution) was added. Capture Plates were placed in the incubator for 30 minutes at 46° C.±1° C. Capture Plates were then removed from the incubator and incubated at room temperature for 30 minutes. Finally, the Capture Plates were read using the Victor Luminometer (Perkin Elmer, Waltham, MA).

[0305] Branched DNA Assays—QuantiGene 2.0 (Panomics Cat #: QS0011): Used to Screen all Other Duplexes

[0306] After a 24 hour incubation at the dose or doses stated, media was removed and cells were lysed in 100 μl Lysis Mixture (1 volume lysis mixture, 2 volumes nuclease-free water and 10 μl of Proteinase-K/ml for a final concentration of 20 mg/ml) then incubated at 65° C. for 35 minutes.

[0307] μl Working Probe Set (TTR probe for gene target and GAPDH for endogenous control) and 80 μl of cell-lysate were then added to the Capture Plates. Capture Plates were incubated at 55° C.±1° C. (approx. 16-20 hrs). The next day, the Capture Plates were washed 3 times with 1×Wash Buffer (nuclease-free water, Buffer Component 1 and Wash Buffer Component 2), then dried by centrifuging for 1 minute at 240 g. 100 μl of pre-Amplifier Working Reagent was added to the Capture Plates, which were sealed with aluminum foil and incubated for 1 hour at 55° C.±1° C. Following a 1 hour incubation, the wash step was repeated, then 100 μl Amplifier Working Reagent was added. After 1 hour, the wash and dry steps were repeated, and 100 μl Label Probe was added. Capture plates were incubated 50° C.±1° C. for 1 hour. The plates were then washed with 1×Wash Buffer and dried, and then 100 μl Substrate was added to the Capture Plates. Capture Plates were read using the SpectraMax Luminometer (Molecular Devices, Sunnyvale, CA) following 5 to 15 minutes incubation.

[0308] bDNA Data Analysis:

[0309] bDNA data were analyzed by (i) subtracting the average background from each triplicate sample, (ii) averaging the resultant triplicate GAPDH (control probe) and TTR (experimental probe) values, and then (iii) taking the ratio: (experimental probe-background)/(control probe-background).

[0310] Results

[0311] A summary of the single dose and IC50 results for TTR-dsRNAs (TTR siRNAs) are presented below in Table 8. Single dose results are expressed as % TTR mRNA relative to control, assayed in HepG2 cells. IC50s were determined in HepG2 and/or Hep3B cells, as indicated.

TABLE 8
Single dose and IC50 results of in vitro screens of TTR siRNAs

| | Single Dose at 10 nM | | | | | |
|---|---|---|---|---|---|---|
| | % relative to control | | IC50 (nM) | | | |
| | HepG2 | | HepG2 | | Hep3B | |
| Duplex # | qPCR | bDNA | qPCR | bDNA | qPCR | bDNA |
| AD-18243 | 50.35 | 141.53 | ND | ND | ND | ND |
| AD-18244 | 64.26 | 158.55 | ND | ND | ND | ND |
| AD-18245 | 56.89 | 107.22 | ND | ND | ND | ND |
| AD-18246 | 10.53 | 32.51* | 0.265 | 0.086 | ND | ND |
| AD-18247 | 125.56 | 69.57 | ND | ND | ND | ND |
| AD-18248 | 127.78 | 66.97 | ND | ND | ND | ND |
| AD-18249 | 48.77 | 48.76 | ND | ND | ND | ND |
| AD-18250 | 96.94 | 86.42 | ND | ND | ND | ND |
| AD-18251 | 170.41 | 129.15 | ND | ND | ND | ND |
| AD-18252 | 73.52 | 81.90 | ND | ND | ND | ND |
| AD-18253 | 25.25 | 61.25 | ND | ND | ND | ND |
| AD-18254 | 95.13 | 103.96 | ND | ND | ND | ND |
| AD-18255 | 119.46 | ND | ND | ND | ND | ND |
| AD-18256 | 42.64 | 95.67 | ND | ND | ND | ND |
| AD-18257 | 146.25 | 141.75 | ND | ND | ND | ND |
| AD-18258 | 10.20 | 13.41* | 0.007 | 0.005 | 0.004 | 0.005 |
| AD-18259 | 9.30 | 20.91* | 0.102 | 0.005 | ND | ND |
| AD-18260 | 125.37 | 81.36 | ND | ND | ND | ND |
| AD-18261 | 14.27 | 19.40* | 0.210 | ND | ND | ND |
| AD-18262 | 84.95 | 104.05 | ND | ND | ND | ND |
| AD-18263 | 16.32 | 23.25* | 0.110 | ND | ND | ND |
| AD-18264 | 104.18 | 83.69 | ND | ND | ND | ND |
| AD-18265 | 41.62 | 64.87 | ND | ND | ND | ND |
| AD-18266 | 39.98 | 110.53 | ND | ND | ND | ND |
| AD-18267 | 149.64 | ND | ND | ND | ND | ND |
| AD-18268 | 152.93 | 174.04 | ND | ND | ND | ND |
| AD-18269 | 37.27 | 92.28 | ND | ND | ND | ND |
| AD-18270 | 99.44 | 164.75 | ND | ND | ND | ND |
| AD-18271 | 18.89 | 28.33* | 0.503 | 0.004 | ND | ND |
| AD-18272 | 128.32 | 132.58 | ND | ND | ND | ND |
| AD-18273 | 115.78 | 201.95 | ND | ND | ND | ND |
| AD-18274 | 8.97 | 20.04* | 0.009 | 0.176 | 0.036 | 0.012 |
| AD-18275 | 4.09 | 22.25* | 0.026 | 0.118 | ND | ND |
| AD-18276 | 19.73 | 45.22* | 0.198 | 0.677 | ND | ND |
| AD-18277 | 10.55 | 26.31* | 0.121 | 0.426 | ND | ND |
| AD-18278 | 108.86 | 116.26 | ND | ND | ND | ND |
| AD-18279 | 66.59 | ND | ND | ND | ND | ND |
| AD-18280 | 103.26 | 170.52 | ND | ND | ND | ND |
| AD-18281 | 87.98 | 123.88 | ND | ND | ND | ND |
| AD-18282 | 82.47 | 140.32 | ND | ND | ND | ND |
| AD-18283 | 106.54 | 182.78 | ND | ND | ND | ND |
| AD-18284 | 106.93 | 151.78 | ND | ND | ND | ND |
| AD-18285 | 26.58 | 60.05* | ND | 0.089 | ND | ND |
| AD-18286 | 109.95 | 173.66 | ND | ND | ND | ND |
| AD-18287 | 54.23 | 155.45 | ND | ND | ND | ND |
| AD-18288 | 73.52 | 174.09 | ND | ND | ND | ND |
| AD-18289 | 103.36 | 174.76 | ND | ND | ND | ND |
| AD-18290 | 17.06 | 52.04* | 1.253 | 0.181 | ND | ND |
| AD-18291 | 7.71 | 169.29* | 1.304 | 0.019 | ND | ND |
| AD-18292 | 7.51 | 210.03* | 0.604 | 0.005 | ND | ND |
| AD-18293 | 3.61 | 62.53* | 0.078 | 0.003 | ND | ND |
| AD-18294 | 111.53 | 107.56 | ND | ND | ND | ND |
| AD-18295 | 115.88 | 105.37 | ND | ND | ND | ND |
| AD-18296 | 57.03 | 38.03 | ND | ND | ND | ND |
| AD-18297 | 87.69 | 73.87 | ND | ND | ND | ND |
| AD-18298 | 10.39 | 7.25* | 0.455 | 0.008 | ND | ND |
| AD-18299 | 18.79 | 18.06* | 0.895 | 0.014 | ND | ND |
| AD-18300 | 108.70 | ND | ND | ND | ND | ND |
| AD-18301 | 114.22 | 70.50 | ND | ND | ND | ND |
| AD-18302 | 116.19 | 122.40 | ND | ND | ND | ND |
| AD-18303 | 124.89 | ND | ND | ND | ND | ND |
| AD-18304 | 132.99 | 89.54 | ND | ND | ND | ND |
| AD-18305 | 153.10 | ND | ND | ND | ND | ND |
| AD-18306 | 159.22 | ND | ND | ND | ND | ND |
| AD-18307 | 116.83 | 84.57 | ND | ND | ND | ND |
| AD-18308 | 156.72 | 87.80 | ND | ND | ND | ND |
| AD-18309 | 113.22 | 101.97 | ND | ND | ND | ND |
| AD-18310 | 132.33 | ND | ND | ND | ND | ND |
| AD-18311 | 161.68 | 92.92 | ND | ND | ND | ND |
| AD-18312 | 103.01 | 71.17 | ND | ND | ND | ND |
| AD-18313 | 120.65 | 53.26 | ND | ND | ND | ND |
| AD-18314 | 116.33 | ND | ND | ND | ND | ND |
| AD-18315 | 115.13 | ND | ND | ND | ND | ND |
| AD-18316 | 118.73 | 122.34 | ND | ND | ND | ND |
| AD-18317 | 114.03 | 121.10 | ND | ND | ND | ND |
| AD-18318 | 80.85 | 122.57 | ND | ND | ND | ND |
| AD-18319 | 119.14 | 148.87 | ND | ND | ND | ND |
| AD-18320 | 22.86 | 55.43* | ND | 0.023 | 0.403 | ND |
| AD-18321 | 6.44 | 31.56* | 0.001 | 0.033 | ND | ND |
| AD-18322 | 54.21 | 100.46 | ND | ND | ND | ND |
| AD-18323 | 6.37 | 28.71* | 0.005 | 0.023 | ND | ND |
| AD-18324 | 2.53 | 15.98* | 0.002 | 0.006 | 0.005 | 0.014 |
| AD-18325 | 2.52 | 11.96* | 0.001 | 0.016 | ND | ND |
| AD-18326 | 18.34 | 43.16* | 0.025 | 0.186 | ND | ND |
| AD-18327 | 18.28 | 13.90* | 0.044 | 0.215 | ND | ND |
| AD-18328 | 4.53 | 26.04* | 0.003 | 0.004 | 0.006 | 0.006 |
| AD-18329 | 96.93 | 131.54 | ND | ND | ND | ND |
| AD-18330 | 11.80 | 45.18* | 0.0004 | 0.010 | 0.020 | ND |
| AD-18331 | 117.77 | 163.07 | ND | ND | ND | ND |
| AD-18332 | 11.53 | 35.09* | 0.001 | 0.076 | 0.065 | ND |
| AD-18333 | 12.24 | 46.94* | 0.001 | 0.115 | 0.075 | ND |
| AD-18334 | 16.27 | 55.28* | 0.0004 | 0.181 | 1.071 | ND |
| AD-18335 | 53.52 | 112.80 | ND | ND | ND | ND |
| AD-18336 | 6.39 | 33.00* | 0.001 | 0.112 | 0.081 | ND |
| AD-18337 | 51.77 | 105.33 | ND | ND | ND | ND |
| AD-18338 | 48.21 | 102.86 | ND | ND | ND | ND |
| AD-18339 | 6.48 | 26.56* | 0.004 | 0.002 | 0.018 | 0.029 |
| AD-18340 | 4.53 | 30.76* | 0.002 | 0.002 | ND | ND |
| AD-18341 | 31.27 | 100.41 | ND | ND | ND | ND |
| AD-18342 | 7.60 | 42.89* | ND | 0.016 | 0.076 | ND |
| AD-18343 | 3.42 | 17.45* | ND | 0.001 | ND | ND |
| AD-18344 | 75.08 | 134.31 | ND | ND | ND | ND |
| AD-18345 | 13.62 | 42.75* | 0.002 | 0.013 | ND | ND |
| AD-18346 | 59.25 | 121.10 | ND | ND | ND | ND |
| AD-18347 | 91.23 | 139.54 | ND | ND | ND | ND |
| AD-18348 | 89.95 | 159.29 | ND | ND | ND | ND |
| AD-18349 | 108.01 | 144.96 | ND | ND | ND | ND |
| AD-18350 | 123.65 | 125.87 | ND | ND | ND | ND |
| AD-18351 | 108.36 | 104.02 | ND | ND | ND | ND |
| AD-18352 | 87.82 | 128.72 | ND | ND | ND | ND |
| AD-18353 | 14.40 | 65.77 | 0.012 | 0.027 | ND | ND |
| AD-18354 | 99.27 | 123.53 | ND | ND | ND | ND |
| AD-18355 | 135.04 | 150.88 | ND | ND | ND | ND |
| AD-18356 | 100.76 | 178.96 | ND | ND | ND | ND |
| AD-18357 | 125.30 | 162.85 | ND | ND | ND | ND |
| AD-18358 | 103.15 | 136.01 | ND | ND | ND | ND |
| AD-18359 | 34.74 | 140.48 | ND | ND | ND | ND |
| AD-18360 | 103.86 | 146.86 | ND | ND | ND | ND |
| AD-18361 | 105.74 | 152.74 | ND | ND | ND | ND |
| AD-18362 | 106.96 | 188.22 | ND | ND | ND | ND |
| AD-18363 | 124.22 | 58.46 | ND | ND | ND | ND |
| AD-18364 | 113.75 | 66.87 | ND | ND | ND | ND |
| AD-18446 | 29.73 | 13.30 | ND | ND | ND | ND |
| AD-18447 | 109.74 | 53.63 | ND | ND | ND | ND |
| AD-18448 | 22.96 | 8.81 | ND | ND | ND | ND |
| AD-18449 | 112.59 | 50.11 | ND | ND | ND | ND |
| AD-18450 | 89.41 | 34.89 | ND | ND | ND | ND |
| AD-18451 | 74.35 | 23.88 | ND | ND | ND | ND |
| AD-18452 | 125.25 | 54.86 | ND | ND | ND | ND |
| AD-18453 | 126.98 | 56.31 | ND | ND | ND | ND |
| AD-18454 | 113.88 | 52.48 | ND | ND | ND | ND |
| AD-18455 | 163.00 | 48.89 | ND | ND | ND | ND |
| AD-18456 | 15.70 | 10.52 | ND | ND | ND | ND |
| AD-18457 | 12.86 | 8.22 | ND | ND | ND | ND |
| AD-18458 | 13.00 | 7.00 | ND | ND | ND | ND |
| AD-18459 | 14.41 | 10.72 | ND | ND | ND | ND |
| AD-18460 | 121.16 | 74.87 | ND | ND | ND | ND |
| AD-18461 | 100.53 | 71.87 | ND | ND | ND | ND |
| AD-18462 | 47.75 | 29.35 | ND | ND | ND | ND |
| AD-18463 | 58.98 | 44.79 | ND | ND | ND | ND |

ND: no data;
*indicates result that represents average of two experiments.

[0312] The dose response data used to identify the IC50 for 5 TTR-dsRNAs (AD-18258, AD-18274, AD-18324, AD-18328, and AD-18339), are presented in detail below in Table 9. All siRNAs were determined to have pM IC50s. The IC50 data for dsRNAs in Table 8 is a summary of the data presented in Table 9 below.

TABLE 9
Dose response data for 5 TTR-dsRNAs

| | | % inhibition relative to control AD-1955 | | | | | | | | | | | | |
|---|---|---|---|---|---|---|---|---|---|---|---|---|---|---|
| | Detection | Dose of duplex (nM) | | | | | | | | | | | | IC50 |
| Cell type | method | 10 | 1 | 0.5 | 0.1 | 0.05 | 0.01 | 0.005 | 0.001 | 0.0005 | 0.0001 | 0.00005 | 0.00001 | (nM) |
| Duplex AD-18258 | | | | | | | | | | | | | | |
| HepG2 | qPCR | 14.4 | 14.1 | 16.2 | 23.9 | 27.26 | 40.19 | 68.46 | 78.1 | 74.48 | 104.37 | 98.28 | 113.68 | 0.007 |
| HepG2 | bDNA | 14.3 | 14.5 | 11.1 | 12.8 | 18.82 | 19.77 | 51.21 | 56.03 | 63.63 | 58.35 | 43.64 | 51.05 | 0.005 |
| Hep3B | qPCR | 11.9 | 8.62 | 12.4 | 16.4 | 28.35 | 30.49 | 58.36 | 54.57 | 81.26 | 89.43 | 81.85 | 101.87 | 0.004 |
| Hep3B | bDNA | 7.65 | 7.5 | 11.3 | 12.6 | 28.85 | 27.89 | 64.57 | 73.48 | 72.03 | 91.44 | 86.71 | 89.31 | 0.005 |
| Duplex AD-18274 | | | | | | | | | | | | | | |
| HepG2 | qPCR | 6.68 | 8.45 | 11.7 | 24.2 | 42.08 | 49.89 | 56.95 | 62.99 | 64.47 | 54.92 | 67.39 | 72.67 | 0.009 |
| HepG2 | bDNA | 27.5 | 69 | 25.2 | 34.2 | 73.03 | 103.4 | 121.57 | 97.31 | 154.93 | 156.7 | Nd | 152.25 | 0.176 |
| Hep3B | qPCR | 7.58 | 17 | 15.6 | 43.9 | 42.22 | 60.55 | 78.8 | 77.81 | 79.97 | 85.84 | 86.13 | 83.99 | 0.036 |
| Hep3B | bDNA | 3.77 | 4.92 | 7.51 | 15 | 35.21 | 51.66 | 72.45 | 70.12 | 78.31 | 77.52 | 90.72 | 83.01 | 0.012 |
| Duplex AD-18324 | | | | | | | | | | | | | | |
| HepG2 | qPCR | 2.07 | 2.27 | 2.74 | 6.36 | 8.18 | 15.23 | 28.82 | 52.79 | 90.86 | 94.72 | 116.07 | 98.97 | 0.002 |
| HepG2 | bDNA | 14.5 | 7.88 | 11.8 | 15.9 | 17.2 | 46.44 | 40.4 | 91.86 | 0 | 95.57 | 0 | 52.15 | 0.006 |
| Hep3B | qPCR | 2.07 | 3.48 | 5.76 | 16.2 | 18.73 | 44.54 | 49.77 | 68.88 | 63.48 | 76.61 | 74.7 | 77.83 | 0.005 |
| Hep3B | bDNA | 3.48 | 3.8 | 5.15 | 15.2 | 30.84 | 55.36 | 74.75 | 99.39 | 88.89 | 110.83 | 96.55 | 110.26 | 0.014 |
| Duplex AD-18328 | | | | | | | | | | | | | | |
| HepG2 | qPCR | 5.85 | 3.97 | 3.32 | 5.62 | 8 | 16.75 | 55.01 | 39.76 | 122.41 | 102.37 | 114.02 | 124.09 | 0.003 |
| HepG2 | bDNA | 12.3 | 10.7 | 10.7 | 11.9 | 20.06 | 25 | 69.52 | 57.29 | 112.28 | 98.14 | 142.26 | 148.92 | 0.004 |
| Hep3B | qPCR | 3.17 | 5.52 | 11.7 | 13.8 | 27.68 | 39.58 | 61.21 | 61.87 | 90.51 | 87.56 | 106.03 | 108.72 | 0.006 |
| Hep3B | bDNA | 3.08 | 3.66 | 4.19 | 7.25 | 21.05 | 22.1 | 73.74 | 63.19 | 105.55 | 96.27 | 105.97 | 96.46 | 0.006 |
| Duplex AD-18339 | | | | | | | | | | | | | | |
| HepG2 | qPCR | 6.27 | 7.28 | Nd | 11 | 15.25 | 38.69 | 38.78 | 71.7 | 84.09 | 62.2 | 75.61 | 85.46 | 0.004 |
| HepG2 | bDNA | 15.1 | 8.14 | 5.13 | 6.89 | 12.17 | 32.14 | 42.98 | 64.01 | 60.76 | 79.95 | 81.97 | 95.43 | 0.002 |
| Hep3B | qPCR | 8.3 | 9.47 | 13.2 | 34.5 | 44.54 | 77.38 | 81.04 | 81.41 | 93.95 | 81.04 | 75.61 | 78.28 | 0.018 |
| Hep3B | bDNA | 10.5 | 9.43 | 11.7 | 27.1 | 44.88 | 72.32 | 79.88 | 79.6 | 87.46 | 96.53 | 95.13 | 89.88 | 0.029 |

[0313] A summary of the single dose results for rodent specific TTR-dsRNAs (TTR siRNAs) are presented below in Table 10. Single dose results are expressed as % TTR mRNA relative to control, assayed in rat H.4.II.E cells, after transfection of rodent specific TTR siRNAs at 10 nM. These results show that some rodent specific TTR siRNAs are effective in suppressing endogenous rat TTR mRNA in vitro.

TABLE 10
Single dose results of in vitro screen of rodent
specific TTR-dsRNAs (TTR siRNAs)

| Duplex # | % Relative to control at 10 nM |
|---|---|
| AD-18529 | 19.83 |
| AD-18530 | 44.49 |
| AD-18531 | 6.01 |
| AD-18532 | 24.06 |
| AD-18533 | 37.78 |
| AD-18534 | 8.19 |
| AD-18535 | 10.18 |
| AD-18536 | 16.13 |
| AD-18537 | 15.88 |
| AD-18538 | 19.93 |
| AD-18539 | 49.24 |
| AD-18540 | 2.99 |
| AD-18541 | 1.32 |
| AD-18542 | 6.3 |
| AD-18543 | 16.46 |
| AD-18544 | 17.55 |
| AD-18545 | 3.53 |
| AD-18546 | 2.75 |
| AD-18547 | 7.01 |
| AD-18548 | 5.02 |
| AD-18549 | 1.61 |
| AD-18550 | 9.58 |
| AD-18551 | 7.74 |
| AD-18552 | 3.74 |
| AD-18553 | 50.39 |
| AD-18554 | 111.06 |

### Example 3. In Vitro Assay of TTR siRNAs for Induction of TNF-α and IFN-α Secretion

[0314] To evaluate potential for immunostimulation, TTR siRNAs were assayed in vitro for induction of TNF-α and IFN-α secretion.

[0315] Human PBMC were isolated from freshly collected buffy coats obtained from healthy donors (Research Blood Components, Inc., Boston, MA) by a standard Ficoll-Hypaque density centrifugation. Freshly isolated cells (1×10⁵/well/100 μl) were seeded in 96-well plates and cultured in RPMI 1640 GlutaMax medium (Invitrogen) supplemented with 10% heat-inactivated fetal bovine serum and 1% antibiotic/antimycotic (Invitrogen).

[0316] siRNAs were transfected into PBMC using DOTAP transfection reagent (Roche Applied Science). The DOTAP was first diluted in Opti-MEM (Invitrogen) for 5 minutes before mixing with an equal volume of Opti-MEM containing the siRNA. siRNA/DOTAP complexes were incubated as specified by the manufacturer's instructions and subsequently added to PBMC (50 μl/well) which were then cultured for 24 hours. Positive and negative control siRNAs were included in all assays. AD-5048 was used as a positive control siRNA. AD-5048 corresponds to a sequence that targets human Apolipoprotein B (Soutschek et al., 2004) and elicits secretion of both IFN-α and TNF-α in this assay. AD-1955, which does not elicit IFN-α and TNF-α secretion in this assay, was used as a negative control siRNA. All siRNAs were used at a final concentration of 133 nM. The ratio of RNA to transfection reagent was 16.5 pmoles per μg of DOTAP.

[0317] Cytokines were detected and quantified in culture supernatants with a commercially available ELISA kit for IFN-α (BMS216INST) and TNF-α (BMS223INST), both from Bender MedSystems (Vienna, Austria). TTR siRNA cytokine induction is expressed as percent IFN-α or TNF-α produced relative to the positive control siRNA AD-5048.

[0318] IFN-α and TNF-α stimulation results for a number of TTR siRNAs are presented in FIG. 1 (mean of quadruplicate wells±SD) and below in Table 11 (percentage compared with AD-5048). None of the TTR siRNAs evaluated induced significant TNF-α or IFN-α secretion by cultured human PBMCs.

TABLE 11
IFN-α and TNF-α stimulation results for TTR siRNAs

| | IFN-α | TNF-α |
|---|---|---|
| Duplex # | (% of AD-5048) | (% of AD-5048) |
| AD-18246 | 0 | 4 |
| AD-18258 | 0 | 0 |
| AD-18259 | 0 | 0 |
| AD-18261 | 0 | 0 |
| AD-18263 | 0 | 0 |
| AD-18271 | 0 | 0 |
| AD-18274 | 2 | 1 |
| AD-18275 | 0 | 0 |
| AD-18276 | 0 | 0 |
| AD-18277 | 0 | 0 |
| AD-18285 | 0 | 0 |
| AD-18290 | 0 | 0 |
| AD-18291 | 0 | 0 |
| AD-18292 | 0 | 0 |
| AD-18293 | 0 | 0 |
| AD-18298 | 0 | 0 |
| AD-18299 | 0 | 0 |
| AD-18320 | 0 | 0 |
| AD-18321 | 0 | 0 |
| AD-18323 | 0 | 0 |
| AD-18324 | 0 | 0 |
| AD-18325 | 0 | 0 |
| AD-18326 | 0 | 0 |
| AD-18327 | 0 | 0 |
| AD-18328 | 0 | 0 |
| AD-18330 | 0 | 0 |
| AD-18332 | 1 | 0 |
| AD-18333 | 0 | 1 |
| AD-18334 | 0 | 1 |
| AD-18336 | 1 | 0 |
| AD-18339 | 0 | 0 |
| AD-18340 | 0 | 0 |
| AD-18342 | 0 | 0 |
| AD-18343 | 0 | 0 |
| AD-18345 | 0 | 0 |
| AD-18353 | 0 | 0 |
| AD-18448 | 0 | 0 |
| AD-18456 | 0 | 0 |
| AD-18457 | 0 | 0 |
| AD-18458 | 0 | 0 |
| AD-18459 | 0 | 0 |

[0319] The five lead TTR targeting dsRNAs (TTR siRNAs) were selected based on IC50s in the pM range in the human hepatocyte cell lines HepG2 and Hep3B, and the absence of immunostimulatory activity. Duplexes without any mismatches are more likely to achieve significant knockdown of the target transcript than duplexes with mismatches between the oligo and the mRNA. To better enable interpretation of cross-species toxicology data and to have the broadest applicability to human patients, duplexes that have 100% identity in orthologous genes from rat, cynomolgus monkey and human, and that do not target regions with known polymorphisms are generally preferred. The five lead compounds were selected based on IC50 in hepatocyte cell lines in the pM range, the absence of immunostimulatory activity, specificity to the human TTR transcripts, and absence of known polymorphisms (mutations) in the region of the mRNA targeted by the duplex. In the case of TTR, no 19 base oligos were found with complete identity in human, rat and cynomolgus monkey. A summary of these data are presented in Table 12, which also includes information on known TTR mutations in the region targeted by the duplex and cross-species reactivity.

TABLE 12
Summary of data for five most potent TTR dsRNAs.

| | IC50 (qPCR): | IC50 (bDNA): | | Mutations | |
|---|---|---|---|---|---|
| Duplex # | nM HepG2 | nM HepG2 | IFNa/TNFa | not covered | Cross-species reactivity |
| AD-18258 | 0.007 | 0.005 | Negative | None | Cyno: 1 mismatch @ |
| | | | | (non-coding | position 14 A to G |
| | | | | region) | Rat: no homology at |
| | | | | | any position |
| AD-18274 | 0.009 | 0.176 | Negative | Lys70Asn; | Cyno: no mismatch |
| | | | | Val71Ala; | Rat: no homology at |
| | | | | Ile73Val; | any position |
| | | | | Asp74His | |
| AD-18324 | 0.002 | 0.006 | Negative | None | Cyno: no mismatch |
| | | | | (non-coding | Rat: no homology at |
| | | | | region) | any position |
| AD-18328 | 0.003 | 0.004 | Negative | None | Cyno: no mismatch |
| | | | | (non-coding | Rat: 7 mismatches |
| | | | | region) | |
| AD-18339 | 0.004 | 0.002 | Negative | None | None |
| | | | | (non-coding | |
| | | | | region) | |

### Example 4. In Vivo Reduction of Liver TTR mRNA and Plasma TTR Protein by LNP01-18324, LNP01-18328 and LNP01-18246 in Transgenic Mice

[0320] Two TTR siRNAs, AD-18324 and AD-18328, were chosen for in vivo evaluation. These duplexes exhibited potent dose-dependent silencing in vitro in hepatocyte cell lines (e.g. HepG2). FIG. 2A and FIG. 2B show the dose responses in HepG2 cells after transfection with AD-18324 (FIG. 2A) or AD-18328 (FIG. 2B) where the doses are expressed in nM on the x-axis and the responses are expressed as fraction TTR mRNA remaining relative to control, on the y-axis. In HepG2 cells, the IC50s of AD-18324 and AD-18328 were determined to be 2 pM and 3 pM, respectively. The TTR target sites for both lead dsRNA candidates are in the 3′ untranslated region of the TTR mRNA, in a region where there are no reported mutations in the literature.

[0321] The sequences of each strand of the two lead candidates are reproduced below from the Tables. Strand: s=sense; as=antisense; Position: position of 5′ base on transcript NM_000371.2.

| | | | | Sequence | SEQ |
|---|---|---|---|---|---|
| Duplex # | Strand | Oligo # | Position* | 5′ to 3′ | ID NO: |
| AD-18324 | s | A-32337 | 509 | GGAuuucAuGuA | 1001 |
| | | | | AccAAGAdTdT | |
| AD-18324 | as | A-32338 | 527 | UCUUGGUuAcAU | 1002 |
| | | | | GAAAUCCdTdT | |
| AD-18328 | s | A-32345 | 518 | GuAAccAAGAG | 1009 |
| | | | | uAuuccAudTdT | |
| AD-18328 | as | A-32346 | 536 | AUGGAAuACUCU | 1010 |
| | | | | UGGUuACdTdT | |

[0322] In addition, a rodent cross-reactive TTR dsRNA, AD-18246, was chosen for further evaluation in vivo. AD-18246 targets a sequence beginning at position 88 of the open reading frame, where there are three mutations reported in the literature. A dose response curve for AD-18246 in HepG2 cells is shown in FIG. 3. AD-18246 is substantially less potent than AD-18324 and AD-18328; the IC50 of AD-18246 was determined to be 265 pM.

[0323] AD-18324, AD-18328, and AD-18246 were administered to transgenic mice after formulation in LNP01. 3-5 month old H129-mTTR-KO/iNOS-KO/hTTR transgenic mice (mouse transthyretin knock-out/inducible nitric oxide synthase knock-out/human transthyretin transgenic) were intravenously (IV) administered 200 μl of LNP01-formulated transthyretin-specific siRNA (AD-18324, AD-18328, or AD-18246), LNP01-formulated control siRNA targeting the non-mammalian luciferase gene (AD-1955) or PBS via the tail vein at concentrations of 1.0 mg/kg, 3.0 mg/kg, or 6.0 mg/kg for siRNAs AD-18324 and AD-18328, 3.0 mg/kg for siRNA AD-18246, and 6.0 mg/kg for siRNA AD-1955. LNP01 is a lipidoid formulation comprised of ND98, Cholesterol, and PEG-Ceramide C16.

[0324] After approximately forty-hours, mice were anesthetized with 200 μl of ketamine, and then exsanguinated by severing the right caudal artery. Whole blood was isolated and plasma was isolated and stored at −80° C. until assaying. Liver tissue was collected, flash-frozen and stored at −80° C. until processing.

[0325] Efficacy of treatment was evaluated by (i) measurement of TTR mRNA in liver at 48 hours post-dose, and (ii) measurement of TTR protein in plasma at prebleed and at 48 hours post-dose. TTR liver mRNA levels were assayed utilizing the Branched DNA assays-QuantiGene 2.0 (Panomics cat #: QS0011). Briefly, mouse liver samples were ground and tissue lysates were prepared. Liver lysis mixture (a mixture of 1 volume of lysis mixture, 2 volume of nuclease-free water and 10 ul of Proteinase-K/ml for a final concentration of 20 mg/ml) was incubated at 65° C. for 35 minutes. 20 μl of Working Probe Set (TTR probe for gene target and GAPDH for endogenous control) and 80 μl of tissue-lysate were then added into the Capture Plate. Capture Plates were incubated at 55° C.±1° C. (aprx. 16-20 hrs). The next day, the Capture Plate were washed 3 times with 1×Wash Buffer (nuclease-free water, Buffer Component 1 and Wash Buffer Component 2), then dried by centrifuging for 1 minute at 240 g. 100 μl of pre-Amplifier Working Reagent was added into the Capture Plate, which was sealed with aluminum foil and incubated for 1 hour at 55° C.±1° C. Following 1 hour incubation, the wash step was repeated, then 100 μl of Amplifier Working Reagent was added. After 1 hour, the wash and dry steps were repeated, and 100 μl of Label Probe was added. Capture plates were incubated 50° C.±1° C. for 1 hour. The plate was then washed with 1×Wash Buffer, dried and 100 μl Substrate was added into the Capture Plate. Capture Plates were read using the SpectraMax Luminometer following a 5 to 15 minute incubation. bDNA data were analyzed by subtracting the average background from each triplicate sample, averaging the resultant triplicate GAPDH (control probe) and TTR (experimental probe) values, and then computing the ratio: (experimental probe-background)/(control probe-background).

[0326] TTR plasma levels were assayed utilizing the commercially available kit “AssayMax Human Prealbumin ELISA Kit” (AssayPro, St. Charles, MO, Catalog #EP3010-1) according to manufacturer's guidelines. Briefly, mouse plasma was diluted 1:10,000 in 1×mix diluents and added to pre-coated plates along with kit standards, and incubated for 2 hours at room temperature followed by 5×washes with kit wash buffer. Fifty microliters of biotinylated prealbumin antibody was added to each well and incubated for 1 hr at room temperature, followed by 5× washes with wash buffer. Fifty microliters of streptavidin-peroxidase conjugate was added to each well and plates were incubated for 30 minutes at room temperature followed by washing as previously described. The reaction was developed by the addition of 50 μl/well of chromogen substrate and incubation for 10 minutes at room temperature with stopping of reaction by the addition of 50 μl/well of stop solution. Absorbance at 450 nm was read on a Versamax microplate reader (Molecular Devices, Sunnyvale, CA) and data were analyzed utilizing the Softmax 4.6 software package (Molecular Devices).

[0327] LNP01-18324 and LNP01-18328 were found to reduce liver TTR mRNA (FIG. 4A) and plasma TTR protein (FIG. 4B) levels in a dose-dependent manner with IV bolus administration. The mRNA ED50 of LNP01-18328 was determined to be ˜1 mg/kg whereas the ED50 of LNP01-18324 was determined to be ˜2 mg/kg. The effects of LNP01-18324 and LNP01-18328 were specific, because the control, LNP01-1955 at 6 mg/kg, did not significantly affect liver TTR mRNA levels, as compared with the PBS group. LNP01-18324 and LNP01-18328 reduced plasma TTR protein levels relative to the PBS group, with potencies that were similar to those on TTR mRNA levels. At 3 mg/kg, LNP01-18246 reduced liver TTR mRNA levels to a lessor extent than 3 mg/kg LNP01-18324 or LNP01-18328.

[0328] These results demonstrate that LNP01-18324 and LNP01-18328, administered by IV bolus, substantially reduce human TTR mRNA expressed by the transgenic mouse liver, which results in reduction of human TTR protein in the circulation.

### Example 5. In Vivo Reduction of Wild-Type TTR mRNA in the Non-Human Primate Liver by SNALP-18324 and SNALP-18328

[0329] To evaluate the efficacy of TTR siRNAs AD-18324 and AD-18328 in non-human primates on liver TTR mRNA levels, the siRNAs were formulated in SNALP and administered by 15-minute IV infusion. Cynomolgus monkeys (Macaca fascicularis) (2 to 5 kg, 3 animals per group) were administered 15-minute IV infusions of SNALP-18324 (0.3, 1.0 or 3.0 mg/kg), SNALP-18328 (0.3, 1 or 3 mg/kg), or SNALP-1955 (3 mg/kg, with negative control siRNA AD-1955 which targets the non-mammalian gene luciferase). At forty-eight hours post-dosing, monkeys were anesthetized with sodium pentobarbital and exsanguinated. Liver tissue for TTR mRNA determination was collected, flash-frozen, and stored at −80° C. until processing.

[0330] TTR mRNA levels in the liver were assayed utilizing a custom designed Branched DNA assay, utilizing the QuantiGene1.0 technology. Briefly, monkey liver samples were ground and tissue lysates were prepared. Liver lysis mixture (1 volume lysis mixture, 2 volume nuclease-free water, and 10 μl of Proteinase-K/ml for a final concentration of 20 mg/ml) was incubated at 65° C. for 35 minutes. 20 μl Working Probe Set (TTR probe for gene target and GAPDH for endogenous control) and 80 μl tissue-lysate were then added into the Capture Plate. Capture Plates were incubated at 55° C.±1° C. (approx. 16-20 hrs). The next day, the Capture Plates were washed three times with 1× Wash Buffer (nuclease-free water, Buffer Component 1 and Wash Buffer Component 2), then dried by centrifuging for 1 minute at 240 g. 1000 of pre-Amplifier Working Reagent was added into the Capture Plate, which was sealed with aluminum foil and incubated for 1 hour at 55° C.±1° C. Following a 1-hour incubation, the wash step was repeated, and then 100 μl Amplifier Working Reagent was added. After 1 hour, the wash and dry steps were repeated, and 100 μl Label Probe was added. Capture plates were incubated 50° C.±1° C. for 1 hour. The plates were then washed with 1× Wash Buffer and dried, and then 100 μl Substrate was added into the Capture Plate. Capture Plates were read using the SpectraMax Luminometer following a 5 to 15 minute incubation. bDNA data were analyzed by (i) subtracting the average background from each triplicate sample, (ii) averaging the resultant GAPDH (control probe) and TTR (experimental probe) values, and then (iii) taking the ratio: (experimental probe-background)/(control probe-background).

[0331] The results are shown in FIG. 5. SNALP-18324 and SNALP-18328 reduced TTR mRNA levels in the liver in a dose-dependent manner, compared to the negative control SNALP-1955. The mRNA ED50s of SNALP-18328 and SNALP-18324 were determined to be ˜0.3 and ˜1 mg/kg, respectively.

[0332] These results demonstrate that SNALP-18324 and SNALP-18328 are effective in suppressing wild-type TTR mRNA in non-human primate liver when administered by IV infusion.

### Example 6. In Vivo Reduction of Mutant (V30M) TTR mRNA and Protein by SNALP-18328 in the Transgenic Mouse

[0333] To evaluate the efficacy of TTR siRNA AD-18328 on mutant (V30M) TTR mRNA in the liver and mutant (V30M) TTR protein in the serum, AD-18328 was formulated in SNALP and administered by IV bolus to V30M hTTR transgenic mice. 8 to 12-week old V30M hTTR transgenic mice (5 animals/group) were intravenously (IV) administered 200 μl SNALP-18328 (0.03, 0.3 or 3 mg/kg), SNALP-1955 (3 mg/kg, with negative control siRNA AD-1955 which targets the non-mammalian gene luciferase), or PBS. Mice used were the Mus musculus strain H129-hTTR KO from Institute of Molecular and Cellular Biology, Porto, Portugal. Briefly, hTTR H129 transgenic mice were crossed with a H129 endogenous TTR KO mice (null mice to generate the H129-hTTR transgenic mice, in a null mouse TTR background (Maeda, S., (2003), Use of genetically altered mice to study the role of serum amyloid P component in amyloid deposition. Amyloid Suppl. 1, 17-20.).

[0334] At 48 hrs post-injection, animals in all five treatment groups were given a lethal dose of ketamine/xylazine. Serum samples were collected and stored at −80° C. until analysis. Liver tissue was collected, flash-frozen and stored at −80° C. until processing.

[0335] For TTR mRNA quantitation, frozen liver tissue was ground into powder, and lysates were prepared. TTR mRNA levels relative to those of GAPDH mRNA were determined in the lysates by using a branched DNA assay (QuantiGene Reagent System, Panomics, Fremont, CA). Briefly, the QuantiGene assay (Genospectra) was used to quantify mRNA levels in tissue sample lysates according to the manufacturer's instructions. The mean level of TTR mRNA was normalized to the mean level of GAPDH mRNA for each sample. Group means of the normalized values were then further normalized to the mean value for the PBS treated group, to obtain the relative level of TTR mRNA expression.

[0336] For TTR protein quantitation, serum was assayed using the AssayPro (St. Charles, MO) Assaymax PreAlbumin ELISA Kit according to the manufacturer's protocol.

[0337] The results are shown in FIG. 6A and FIG. 6B for liver mRNA and serum protein, respectively. SNALP-18328 treated V30M hTTR transgenic mice had a dose-dependent and significant decrease in liver TTR mRNA levels relative to the PBS control group, reaching a maximum reduction of 97% (p<0.001) at 3 mg/kg SNALP-18328, and a 50% reduction (ED50) at ˜0.15 mg/kg SNALP-18328. Serum TTR protein was also suppressed in a dose-dependent manner, with a maximum reduction of serum TTR protein of 99% (p<0.01) (relative to pre-dose levels) at 3 mg/kg SNALP-18328, consistent with the reduction in TTR mRNA levels. SNALP-1955 at 3 mg/kg did not have a statistically significant effect on either TTR mRNA or protein levels, compared to PBS.

[0338] These results demonstrate that SNALP-18328, when administered IV, is active in suppressing mutant V30M TTR mRNA in the transgenic mouse liver, which results in reduction of mutant V30M TTR protein in the circulation.

### Example 7. Durability of TTR mRNA and Protein Suppression by SNALP-18328 in the Transgenic Mouse

[0339] To evaluate the durability of TTR mRNA and protein suppression by SNALP-18328, AD-18328 was formulated in SNALP and administered by IV bolus to V30M hTTR transgenic mice. At various timepoints post-dose, liver TTR mRNA levels and serum TTR protein levels were quantified. 8- to 12-week old V30M hTTR transgenic mice (4 animals/group) were intravenously (IV) administered 200 μl SNALP-18328 (1 mg/kg) or SNALP-1955 (1 mg/kg, with negative control siRNA AD-1955 which targets the non-mammalian gene luciferase). Mice used were Mus musculus strain H129-hTTR KO from Institute of Molecular and Cellular Biology, Porto, Portugal. Briefly, hTTR H129 transgenic mice were crossed with a H129 endogenous TTR KO mice (null mice to generate the H129-hTTR transgenic mice, in a null mouse TTR background (Maeda, S., (2003), Use of genetically altered mice to study the role of serum amyloid P component in amyloid deposition. Amyloid Suppl. 1, 17-20). Days 3, 8, 15, or 22 post-dose, animals in both treatment groups were given a lethal dose of ketamine/xylazine. Serum samples were collected and stored at −80° C. until analysis. Liver tissue was collected, flash-frozen and stored at −80° C. until processing.

[0340] For TTR mRNA quantitation, frozen liver tissue was ground into powder, and lysates were prepared. TTR mRNA levels relative to those of GAPDH mRNA were determined in the lysates by using a branched DNA assay (QuantiGene Reagent System, Panomics, Fremont, CA). Briefly, the QuantiGene assay (Genospectra) was used to quantify mRNA levels in tissue sample lysates according to the manufacturer's instructions. The mean level of TTR mRNA was normalized to the mean level of GAPDH mRNA for each sample. Group means of the normalized values were then further normalized to the mean value for the PBS treated group, to obtain the relative level of TTR mRNA expression.

[0341] For TTR protein quantitation, serum was assayed using the AssayPro (St. Charles, MO) Assaymax PreAlbumin ELISA Kit according to the manufacturer's protocol.

[0342] The results are shown in FIG. 7A and FIG. 7B for liver mRNA and serum protein, respectively. A single IV bolus administration of SNALP-18328 in the hTTR V30M transgenic mouse resulted in durable inhibition of TTR mRNA levels in the liver and TTR protein levels in the serum. Compared to the control group (1 mg/ml SNALP-1955), a single IV administration of SNALP-18328 at 1 mg/kg significantly reduced relative TTR mRNA levels on Days 3, 8, 15 and 22 post-dose by 96% (p<0.001), 90% (p<0.001), 82% (p<0.001) and 73% (p<0.001), respectively, and did not return to baseline levels at termination of the study (Day 22 post-dose). Protein levels also decreased with a maximum reduction of serum TTR of 97% (p<0.001) (relative to SNALP-1955) at Day 3 post-dose. At Days 8, 15, and 22 post-dose, TTR protein levels were suppressed by 72% (p<0.05), 32% (p<0.05), and 40% (p<0.001), respectively, relative to SNALP-1955.

[0343] These results demonstrate that a single IV administration of SNALP-18328 produces durable suppression of target liver mRNA and serum protein levels in the V30M hTTR transgenic mouse, with significant reductions of both liver TTR mRNA and serum TTR protein at 22 days post-dose.

### Example 8. Durability of Serum TTR Protein and Liver mRNA Suppression by SNALP-18328 in the Non-Human Primate

[0344] To evaluate the durability of serum TTR protein suppression by SNALP-18328, AD-18328 was formulated in SNALP and administered by IV infusion to non-human primates. At various timepoints post-dose, serum TTR protein levels were quantified.

[0345] Cynomolgus monkeys (Macaca fascicularis) (n=5 animals/group for SNALP-18328 groups and n=3 animals/group for SNALP-1955 and PBS groups) were administered a 15-minute IV infusion of SNALP-18328 (0.3, 1 or 3 mg/kg), SNALP-1955 (3 mg/kg) with negative control siRNA AD-1955 which targets the non-mammalian gene luciferase), or PBS. At Days 0, 1, 2, 3, 4, 5, 7, 10, and 14 of the dosing phase, serum samples were collected and stored at −80° C. until analysis.

[0346] Western blot analysis was used to evaluate TTR protein levels in serum samples. Serum samples from each group were pooled and diluted 1:1 with Laemmli sample buffer (β-mercaptoethanol was added at a 1:20 dilution). The samples were heated at 95° C. for 10 minutes. 12.5 μl of each sample was loaded in each lane of a 10-20% Criterion (Biorad, Hercules, CA) prep gel and separated by SDS-PAGE at 120V for 1.5 hrs, then transferred to a nitrocellulose membrane using a semi-dry system at 15V for 1 hour. The membrane was blocked overnight at 4° C. in LiCOR (Lincoln, NE) blocking buffer diluted 1:1 with 1×PBS. The blot was probed first with primary antibodies (goat anti-TTR from Santa Cruz (Santa Cruz, CA) at a dilution of 1:1000 diluted in LiCOR blocking buffer/PBS on a rocker for 1 hr at room temperature. Blots were washed 4× with PBS+0.2% Tween 20 (10 minutes per wash). The fluorescent labeled secondary antibodies (anti-goat 680 nm from Invitrogen (Carlsbad, CA) were added at a dilution of 1:10,000 in LiCOR blocking buffer/PBS and the blot was incubated for 1 hour at room temperature. After incubation, blots were washed 4× with PBS+0.2% Tween 20 followed by one wash with 1×PBS. The Li-COR's Odyssey Infrared Imaging System was used to detect the protein bands. TTR monomer migrates at 15 kDa.

[0347] The results are shown in FIG. 8. Serum TTR protein levels showed a dose-dependent reduction with 1 or 3 mg/kg SNALP-18328, as compared to pre-dose (Day 0) levels. The duration of suppression, following a single IV administration of SNALP-18328 is at least 14 days after 1 or 3 mg/kg SNALP-18328 treatment.

[0348] These results demonstrate that a single IV administration of SNALP-18328 produces durable suppression of TTR protein in the circulation in the non-human primate (Macaca fascicularis), with significant reduction of TTR protein at 14 days post-dose.

[0349] To evaluate the durability of liver TTR mRNA suppression by SNALP-18328, AD-18328 was formulated in SNALP (ALN-TTR01) and administered by single IV infusion to non-human primates. Liver mRNA levels were measured as described herein at day 3 or day 30 post-administration.

[0350] The results are shown in FIG. 20 and demonstrate that ALN-TTR01 suppression of wild type TTR mRNA is durable in non-human primates after 3 days for dosages 1.0 and 3.0 mg/kg and for 30 days at a dose of 10 mg/kg.

### Example 9: In Vivo Reduction of Mutant (V30M) TTR in Peripheral Tissues by SNALP-18328 in the Transgenic Mouse

[0351] Propylactic Efficacy

[0352] To evaluate the efficacy of SNALP-18328 (ALN-TTR01) in reducing TTR in peripheral tissues, hTTR V30M/HSF-1 knock-out mice were evaluated with immunohistochemical staining for TTR. Two-month old hTTR V30M/HSF-1 knock-out mice (Maeda, S., (2003), Use of genetically altered mice to study the role of serum amyloid P component in amyloid deposition. Amyloid Suppl. 1, 17-20) were administered an IV bolus of 3 mg/kg SNALP-18328 (12 animals), 3 mg/kg SNALP-1955 (with negative control siRNA AD-1955 which targets the non-mammalian gene luciferase, 4 animals), or PBS (4 animals) once every two weeks for a total of four doses on days 0, 14, 28, and 42. TTR liver mRNA levels and TTR-immunoreactivity in multiple peripheral tissues were evaluated at 8 weeks post-first dose on day 56.

[0353] Mice were anesthetised with 1 mg/kg medetomidine, and given a lethal dose of ketamine. Tissues and organs of interest were collected. For immunohistochemistry, esophagus (E), stomach (S), intestine (duodenum (I1) and colon (I4)), nerve (N) and dorsal root ganglia (D) were fixed in neutral buffered formalin and embedded in paraffin. For TTR detection, rabbit anti-human TTR primary antibody (1:1000, DAKO, Denmark), and anti-rabbit biotin-conjugated secondary antibody (1:20 Sigma, USA) were followed by extravidin labelling (1:20, Sigma, USA) in order to stain for the TTR protein. The reaction was developed with 3-amino-9-ethyl carbaxole, AEC (Sigma, USA). Semi-quantitative analysis of immunohistochemical slides was performed using Scion image quant program that measures the area occupied by the substrate reaction color and normalizes this value to the total image area. Mean values of % occupied area are displayed with the corresponding standard deviation. Each animal tissue was evaluated in four different areas. The presence of human TTR in parasympathetic ganglia of the stomach and intestine was studied by double immunofluorescent staining with rabbit anti-human TTR (1:1000, DAKO, Denmark) and mouse anti-PGP9.5 (1:40, Serotec, USA) as the primary antibodies; secondary antibodies were, respectively: anti-rabbit Alexa Fluor 488 (Molecular probes, UK) and goat anti-mouse Alexa Fluor 568 (Molecular probes, UK). Slides were mounted with vectashield (Vector) and visualized in a Zeiss Cell Observer System microscope (Carl Zeiss, Germany) equipped with filters for FITC and rhodamine.

[0354] The results are graphed in FIG. 9. In contrast with PBS and SNALP-1955 treated animals, SNALP-18328 treated animals had a significant reduction of TTR-immunoreactivity in all tissues examined (esophagus (E), stomach (S), intestine (duodenum (I1) and colon (I4)), nerve (N) and dorsal root ganglia (D).

[0355] These results demonstrate that SNALP-18328 administration to hTTR V30M/HSF-1 knock-out mice causes a significant reduction of TTR protein deposition in peripheral tissues and organs, including esophagus, stomach, intestine (duodenum and colon), nerve, and dorsal root ganglion.

[0356] Therapeutic Efficacy

[0357] ALN-TTR01 was administered to mature hTTR V30M/HSF-1 knock-out mice to determine the effects of TTR siRNA treatment on regression of mutant human TTR deposits.

[0358] Groups of 21 month old animals (hTTR V30M/HSF-1 knock-out mice) were intravenously administered an IV bolus of ALN-TTR01 or control siRNA at a dose of 3 mg/kg on days 0, 14, 28, 14, 56, and 70. On day 77, the mice were euthanized, tissue was harvested, and TTR deposition was assayed via semi-quantitative analysis of immunohistochemical stained slides using Scion image quant program as described herein. Esophagus, colon; stomach, sciatic nerve; and dorsal root ganglia tissue were examined and results were compared to historical data in this animal model demonstrating both TTR deposition and TTR fibrils present in tissues at this age.

[0359] The results are shown in the graph in FIG. 21. The results demonstrate that treatment with TTR siRNA resulted in >90% regression of existing V30M hTTR tissue deposits.

### Example 10. In Vivo Reduction of Wild-Type TTR mRNA in the Non-Human Primate Liver by XTC-SNALP-18328

[0360] To evaluate the efficacy of the novel lipid nanoparticle formulation XTC-SNALP for delivery of siRNA in non-human primate, TTR siRNA AD-18328 was formulated in XTC-SNALP (XTC-SNALP-18328) and administered by 15-minute IV infusion, and liver TTR mRNA was quantified. Cynomolgus monkeys (Macaca fascicularis) were administered 15-minute IV infusions of XTC-SNALP-18328 (0.03, 0.1, 0.3 or 1 mg/kg) or XTC-SNALP-1955 (1 mg/kg, with negative control siRNA AD-1955 which targets the non-mammalian gene luciferase). At forty-eight hours post-dosing, monkeys were anesthetized with sodium pentobarbital and exsanguinated. Liver tissue for TTR mRNA determination was collected, flash-frozen, and stored at −80° C. until processing. Methods used for TTR mRNA quantitation in liver tissue were similar to those described in Example 5 above.

[0361] The results are shown in FIG. 10. XTC-SNALP-18328 reduced TTR mRNA levels in the liver in a dose-dependent manner, compared to the negative control XTC-SNALP-1955. The mRNA ED50 was determined to be ˜0.1 mg/kg XTC-SNALP-18328.

[0362] These results demonstrate that XTC-SNALP-18328 is effective in suppressing wild-type TTR mRNA in non-human primate liver when administered by IV infusion.

### Example 11: In Vivo Reduction of Wild-Type TTR mRNA in the Non-Human Primate Liver by LNP09-18328 and LNP11-18328

[0363] To evaluate the efficacy of two novel lipid nanoparticle formulations, LNP09 and LNP11, for delivery of siRNA in non-human primate, TTR siRNA AD-18328 was formulated in LNP09 (LNP09-18328) or LNP11 (LNP11-18328), and administered by 15-minute IV infusion, and liver TTR mRNA and serum TTR protein levels were assayed. Cynomolgus monkeys (Macaca fascicularis) were administered 15-minute IV infusions of LNP09-18328 (0.03, 0.1, or 0.3 mg/kg), LNP11-18328 (0.03, 0.1, or 0.3 mg/kg), or PBS. Liver biopsy samples were collected at 48 hrs post-dosing, flash-frozen, and stored at −80° C. until processing. Serum was collected before dosing (pre-bleed), and on Days 1, 2, 4, 7, 14, 21 and 28 post-dosing and stored at −80° C. until processing. Methods used for TTR mRNA quantitation in liver tissue and serum TTR protein evaluation were similar to those described in Examples 5 and 8 above.

[0364] The results are shown in FIG. 11A for mRNA, and in FIG. 11B and FIG. 11C for protein. LNP09-18328 and LNP11-18328 treated animals showed a dose-dependent decrease in TTR mRNA levels in the liver, reaching a maximum reduction at 0.3 mg/kg of ˜85% (LNP09-18328) and ˜90% (LNP11-18328) mRNA relative to the PBS control. The mRNA ED50 was determined to be ˜0.02 mg/kg for both LNP09-18328 and LNP11-18328. At Day 7 post-dosing, serum samples also exhibited a dose-dependent reduction of TTR protein for 0.1 and 0.3 mg/kg LNP09-18328 and LNP11-18328, compared to PBS control levels. FIG. 11C shows a decrease in TTR protein levels with a 0.3 mg/kg dose of LNP09-18328 that persisted over at least 28 days post-dosing, as compared to the PBS control group and as compared with the pre-bleed samples.

[0365] These results demonstrate that LNP09-18328 and LNP11-18328 are effective in suppressing wild-type TTR mRNA in non-human primate liver and wild-type TTR protein in the circulation, when administered by IV infusion. Furthermore, the suppression with LN09-18328 is durable, persisting for at least 28 days following the IV infusion.

### Example 12: In Vivo Reduction of Wild-Type TTR mRNA in the Non-Human Primate Liver by LNP12-18328

[0366] LNP12 formulated AD-18328 was administered to non-human primates to evaluate the efficacy of this formulation.

[0367] LNP12-18328 formulations were prepared using a method adapted from Jeffs et al. (Jeffs L B, et al. (2004) A Scalable, Extrusion-Free Method for Efficient Liposomal Encapsulation of Plasmid DNA. Pharm Res 22:362-372) Briefly, Tech-G1 (described above), distearoyl phosphatidylcholine (DSPC), cholesterol and mPEG2000-DMG were solubilized in 90% ethanol at a molar ratio of 50:10:38.5:1.5. The siRNA was solubilized in 10 mM citrate, pH 3 buffer at a concentration of 0.4 mg/mL. The ethanolic lipid solution and the aqueous siRNA solution were pumped by means of a peristaltic pump fitted with dual pump heads at equivalent volumetric flow rates and mixed in a “T”-junction. Lipids were combined with siRNA at a total lipid to siRNA ratio of 7:1 (wt:wt). The spontaneously formed LNP12-18328 formulations were dialyzed against PBS (155 mM NaCl, 3 mM Na2HPO4, 1 mM KH2PO4, pH 7.5) to remove ethanol and exchange buffer. This formulation yields a mean particle diameter of 80 nm with approximately 90 percent siRNA entrapment efficiency.

[0368] Cynomolgus monkeys (n=3 per group) received either PBS or 0.03, 0.1, or 0.3 mg/kg LNP12-18328 as 15 minute intravenous infusions (5 mL/kg) via the cephalic vein. Liver biopsies were collected from animals at 48 hours post-administration. TTR mRNA levels relative to GAPDH mRNA levels were determined in liver samples as described herein.

[0369] As shown in FIG. 19, high levels of specific knockdown of the wild-type transthyretin (TTR) gene was observed at doses as low as 0.03 mg/kg. This demonstrated that the LNP12 formulation facilitates gene silencing at orders-of-magnitude lower doses than required by any previously-described siRNA liver delivery system.

### Example 13. Synthesis of TTR Tiled Sequences

[0370] A set of TTR duplexes (“tiled duplexes”) were designed that targeted the TTR gene near the target region of AD-18328, which targets the human TTR gene starting at nucleotide 628 of NM_000371.3.

[0371] In the examples below, the numbering representing the position of the 5′ base of an siRNA on the transcript is based on NM_000371.3 (FIG. 12; SEQ ID NO:1331). In the examples shown above, the numbering for siRNA targeting human siRNA was based on NM_000371.2 (FIG. 13A). NM_000371.3 extends the sequence of the 5′ UTR by 110 bases compared to NM_000371.2, as shown in FIG. 14. Thus, as an example, the starting position of AD-18328 is 628 on NM_000371.3 and 518 on NM_000371.2 (FIG. 14).

[0372] TTR tiled sequences were synthesized on MerMade 192 synthesizer at lumol scale. For all the sequences in the list, ‘endolight’ chemistry was applied as detailed below.
[0373] All pyrimidines (cytosine and uridine) in the sense strand contained 2′-O-Methyl bases (2′ 0-Methyl C and 2′-O-Methyl U)
[0374] In the antisense strand, pyrimidines adjacent to (towards 5′ position) ribo A nucleoside were replaced with their corresponding 2-O-Methyl nucleosides
[0375] A two base dTdT extension at 3′ end of both sense and anti sense sequences was introduced
[0376] The sequence file was converted to a text file to make it compatible for loading in the MerMade 192 synthesis software

[0377] Synthesis, Cleavage and Deprotection:

[0378] The synthesis of TTR sequences used solid supported oligonucleotide synthesis using phosphoramidite chemistry. The synthesis of the sequences was performed at 1 um scale in 96 well plates. The amidite solutions were prepared at 0.1M concentration and ethyl thio tetrazole (0.6M in Acetonitrile) was used as activator. The synthesized sequences were cleaved and deprotected in 96 well plates, using methylamine in the first step and fluoride reagent in the second step. The crude sequences were precipitated using acetone:ethanol (80:20) mix and the pellet were re-suspended in 0.2M sodium acetate buffer. Samples from each sequence were analyzed by LC-MS to confirm the identity, UV for quantification and a selected set of samples by IEX chromatography to determine purity.

[0379] Purification and Desalting:

[0380] TTR tiled sequences were purified on AKTA explorer purification system using Source 15Q column. A column temperature of 65 C was maintained during purification. Sample injection and collection was performed in 96 well (1.8 mL-deep well) plates. A single peak corresponding to the full length sequence was collected in the eluent. The purified sequences were desalted on a Sephadex G25 column using AKTA purifier. The desalted TTR sequences were analyzed for concentration (by UV measurement at A260) and purity (by ion exchange HPLC). The single strands were then submitted for annealing.

[0381] TTR Single Strands and Duplexes:

[0382] A detailed list of TTR tiled duplexes and corresponding single strands (sense and antisense) are shown in the table below (Table 13).

TABLE 13
TTR tiled duplexes and corresponding single strands

| Duplex # | Position | Oligo # | Strand | Sequence (5′ to 3″) | SEQ ID NO: |
|---|---|---|---|---|---|
| AD-18323 | 618 | A-32335 | S | GGGAuuucAuGuAAccAAGdTdT | 1332 |
| | | A-32336 | AS | CUUGGUuAcAUGAAAUCCCdTdT | 1333 |
| AD-18324 | 619 | A-32337 | S | GGAuuucAuGuAAccAAGAdTdT | 1334 |
| | | A-32338 | AS | UCUUGGUuAcAUGAAAUCCdTdT | 1335 |
| AD-23000 | 620 | A-42927 | S | GAuuucAuGuAAccAAGAGdTdT | 1336 |
| | | A-42928 | AS | CUCUUGGUuAcAUGAAAUCdTdT | 1337 |
| AD-23001 | 621 | A-42929 | S | AuuucAuGuAAccAAGAGudTdT | 1338 |
| | | A-42930 | AS | ACUCUUGGUuAcAUGAAAUdTdT | 1339 |
| AD-23002 | 622 | A-42931 | S | uuucAuGuAAccAAGAGuAdTdT | 1340 |
| | | A-42932 | AS | uACUCUUGGUuAcAUGAAAdTdT | 1341 |
| AD-23003 | 623 | A-42933 | S | uucAuGuAAccAAGAGuAudTdT | 1342 |
| | | A-42934 | AS | AuACUCUUGGUuAcAUGAAdTdT | 1343 |
| AD-18325 | 624 | A-32339 | S | ucAuGuAAccAAGAGuAuudTdT | 1344 |
| | | A-32340 | AS | AAuACUCUUGGUuAcAUGAdTdT | 1345 |
| AD-23004 | 625 | A-42935 | S | cAuGuAAccAAGAGuAuucdTdT | 1346 |
| | | A-42936 | AS | GAAuACUCUUGGUuAcAUGdTdT | 1347 |
| AD-18326 | 626 | A-32341 | S | AuGuAAccAAGAGuAuuccdTdT | 1348 |
| | | A-32342 | AS | GGAAuACUCUUGGUuAcAUdTdT | 1349 |
| AD-18327 | 627 | A-32343 | S | uGuAAccAAGAGuAuuccAdTdT | 1350 |
| | | A-32344 | AS | UGGAAuACUCUUGGUuAcAdTdT | 1351 |
| AD-23005 | 628 | A-42937 | S | uAAccAAGAGuAuuccAuudTdT | 1352 |
| | | A-42938 | AS | AAUGGAAuACUCUUGGUuAdTdT | 1353 |
| AD-23006 | 629 | A-42939 | S | AAccAAGAGuAuuccAuuudTdT | 1354 |
| | | A-42940 | AS | AAAUGGAAuACUCUUGGUUdTdT | 1355 |
| AD-23007 | 631 | A-42941 | S | AccAAGAGuAuuccAuuuudTdT | 1356 |
| | | A-42942 | AS | AAAAUGGAAuACUCUUGGUdTdT | 1357 |
| AD-23008 | 632 | A-42943 | S | ccAAGAGuAuuccAuuuuudTdT | 1358 |
| | | A-42944 | AS | AAAAAUGGAAuACUCUUGGdTdT | 1359 |
| AD-23009 | 633 | A-42945 | S | cAAGAGuAuuccAuuuuuAdTdT | 1360 |
| | | A-42946 | AS | uAAAAAUGGAAuACUCUUGdTdT | 1361 |
| AD-23010 | 634 | A-42947 | S | AAGAGuAuuccAuuuuuAcdTdT | 1362 |
| | | A-42948 | AS | GuAAAAAUGGAAuACUCUUdTdT | 1363 |
| AD-23011 | 635 | A-42949 | S | AGAGuAuuccAuuuuuAcudTdT | 1364 |
| | | A-42950 | AS | AGuAAAAAUGGAAuACUCUdTdT | 1365 |
| AD-23012 | 636 | A-42951 | S | GAGuAuuccAuuuuuAcuAdTdT | 1366 |
| | | A-42952 | AS | uAGuAAAAAUGGAAuACUCdTdT | 1367 |
| AD-23013 | 637 | A-42953 | S | AGuAuuccAuuuuuAcuAAdTdT | 1368 |
| | | A-42954 | AS | UuAGuAAAAAUGGAAuACUdTdT | 1369 |
| AD-23014 | 638 | A-42955 | S | GuAuuccAuuuuuAcuAAAdTdT | 1370 |
| | | A-42956 | AS | UUuAGuAAAAAUGGAAuACdTdT | 1371 |
| AD-23015 | 639 | A-42957 | S | uAuuccAuuuuuAcuAAAGdTdT | 1372 |
| | | A-42958 | AS | CUUuAGuAAAAAUGGAAuAdTdT | 1373 |
| AD-23016 | 640 | A-42959 | S | AuuccAuuuuuAcuAAAGcdTdT | 1374 |
| | | A-42960 | AS | GCUUuAGuAAAAAUGGAAUdTdT | 1375 |
| AD-23017 | 641 | A-42961 | S | uuccAuuuuuAcuAAAGcAdTdT | 1376 |
| | | A-42962 | AS | UGCUUuAGuAAAAAUGGAAdTdT | 1377 |
| AD-23018 | 642 | A-42963 | S | uccAuuuuuAcuAAAGcAGdTdT | 1378 |
| | | A-42964 | AS | CUGCUUuAGuAAAAAUGGAdTdT | 1379 |
| AD-23019 | 643 | A-42965 | S | ccAuuuuuAcuAAAGcAGudTdT | 1380 |
| | | A-42966 | AS | ACUGCUUuAGuAAAAAUGGdTdT | 1381 |
| AD-23020 | 644 | A-42967 | S | cAuuuuuAcuAAAGcAGuGdTdT | 1382 |
| | | A-42968 | AS | cACUGCUUuAGuAAAAAUGdTdT | 1383 |
| AD-23021 | 645 | A-42969 | S | AuuuuuAcuAAAGcAGuGudTdT | 1384 |
| | | A-42970 | AS | AcACUGCUUuAGuAAAAAUdTdT | 1385 |
| AD-23022 | 646 | A-42971 | S | uuuuuAcuAAAGcAGuGuudTdT | 1386 |
| | | A-42972 | AS | AAcACUGCUUuAGuAAAAAdTdT | 1387 |
| AD-23023 | 647 | A-42973 | S | uuuuAcuAAAGcAGuGuuudTdT | 1388 |
| | | A-42974 | AS | AAAcACUGCUUuAGuAAAAdTdT | 1389 |
| AD-23024 | 648 | A-42975 | S | uuuAcuAAAGcAGuGuuuudTdT | 1390 |
| | | A-42976 | AS | AAAAcACUGCUUuAGuAAAdTdT | 1391 |
| AD-23025 | 649 | A-42977 | S | uuAcuAAAGcAGuGuuuucdTdT | 1392 |
| | | A-42978 | AS | GAAAAcACUGCUUuAGuAAdTdT | 1393 |
| AD-23026 | 650 | A-42979 | S | uAcuAAAGcAGuGuuuucAdTdT | 1394 |
| | | A-42980 | AS | UGAAAAcACUGCUUuAGuAdTdT | 1395 |
| AD-23027 | 651 | A-42981 | S | AcuAAAGcAGuGuuuucAcdTdT | 1396 |
| | | A-42982 | AS | GUGAAAAcACUGCUUuAGUdTdT | 1397 |
| AD-23028 | 652 | A-42983 | S | cuAAAGcAGuGuuuucAccdTdT | 1398 |
| | | A-42984 | AS | GGUGAAAAcACUGCUUuAGdTdT | 1399 |
| AD-18330 | 653 | A-32349 | S | uAAAGcAGuGuuuucAccudTdT | 1400 |
| | | A-32350 | AS | AGGUGAAAAcACUGCUUuAdTdT | 1401 |
| AD-23029 | 654 | A-42985 | S | AAAGcAGuGuuuucAccucdTdT | 1402 |
| | | A-42986 | AS | GAGGUGAAAAcACUGCUUUdTdT | 1403 |
| AD-23030 | 655 | A-42987 | S | AAGcAGuGuuuucAccucAdTdT | 1404 |
| | | A-42988 | AS | UGAGGUGAAAAcACUGCUUdTdT | 1405 |
| AD-23031 | 656 | A-42989 | S | AGcAGuGuuuucAccucAudTdT | 1406 |
| | | A-42990 | AS | AUGAGGUGAAAAcACUGCUdTdT | 1407 |
| AD-18328 | 628 | A-32345 | S | GuAAccAAGAGuAuuccAudTdT | 1408 |
| | | A-32346 | AS | AUGGAAuACUCUUGGUuACdTdT | 1409 |

Strand: s = sense; as = antisense;
Position: position of 5′ base on transcript (NM_000371.3, SEQ ID NO: 1331).

### Example 14. In Vitro Screening of TTR Tiled siRNAs

[0383] Tiled TTR duplexes were assayed in Hep3B cells for inhibition of endogenous TTR expression using real time PCR assays.

[0384] Cell culture and transfection: Hep3B cells (ATCC, Manassas, VA) were grown to near confluence at 37° C. in an atmosphere of 5% CO₂ in Eagle's Minimum Essential Medium (EMEM, ATCC) supplemented with 10% FBS, streptomycin, and glutamine (ATCC) before being released from the plate by trypsinization. Reverse transfection was carried out by adding 5 μl of Opti-MEM to 5 μl of each siRNA in individual wells of a 96-well plate. To this 10 μl of Opti-MEM plus 0.2 μl of Lipofectamine RNAiMax was added per well (Invitrogen, Carlsbad CA. cat #13778-150) and the mixture was incubated at room temperature for 15 minutes. 80 μl of complete growth media described above, but without antibiotic containing 2.0×10⁴ Hep3B cells were then added. Cells were incubated for 24 hours prior to RNA purification. Experiments were performed at 0.1 or 10 nM final duplex concentration.

[0385] Total RNA isolation using MagMAX-96 Total RNA Isolation Kit (Applied Biosystems, Foster City CA, part #: AM1830): Cells were harvested and lysed in 140 μl of Lysis/Binding Solution then mixed for 1 minute at 850 rpm using and Eppendorf Thermomixer (the mixing speed was the same throughout the process). Twenty micro liters of magnetic beads and Lysis/Binding Enhancer mixture were added into cell-lysate and mixed for 5 minutes. Magnetic beads were captured using magnetic stand and the supernatant was removed without disturbing the beads. After removing supernatant, magnetic beads were washed with Wash Solution 1 (isopropanol added) and mixed for 1 minute. Beads were capture again and supernatant removed. Beads were then washed with 150 μl Wash Solution 2 (Ethanol added), captured and supernatant was removed. 50 μl of DNase mixture (MagMax turbo DNase Buffer and Turbo DNase) was then added to the beads and they were mixed for 10 to 15 minutes. After mixing, 100 μl of RNA Rebinding Solution was added and mixed for 3 minutes. Supernatant was removed and magnetic beads were washed again with 150 μl Wash Solution 2 and mixed for 1 minute and supernatant was removed completely. The magnetic beads were mixed for 2 minutes to dry before RNA was eluted with 50 μl of water.

[0386] cDNA synthesis using ABI High capacity cDNA reverse transcription kit (Applied Biosystems, Foster City, CA, Cat #4368813): A master mix of 2 μl 10× Buffer, 0.8 μl 25× dNTPs, 2μ1 Random primers, 1 μl Reverse Transcriptase, 1 μl RNase inhibitor and 3.2 μl of H2O per reaction were added into 10 μl total RNA. cDNA was generated using a Bio-Rad C-1000 or S-1000 thermal cycler (Hercules, CA) through the following steps: 25° C. 10 min, 37° C. 120 min, 85° C. 5 sec, 4° C. hold.

[0387] Real time PCR: 2 μl of cDNA were added to a master mix containing 0.5 μl GAPDH TaqMan Probe (Applied Biosystems Cat #4326317E), 0.5 μl TTR TaqMan probe (Applied Biosystems cat #HS00174914 M1) and 10 μl Roche Probes Master Mix (Roche Cat #04887301001) per well in a LightCycler 480 384 well plate (Roche cat #0472974001). Real time PCR was done in a LightCycler 480 Real Time PCR machine (Roche). Each duplex was tested in two independent transfections and each transfection was assayed in duplicate.

[0388] Real time data were analyzed using the ΔΔCt method. Each sample was normalized to GAPDH expression and knockdown was assessed relative to cells transfected with the non-targeting duplex AD-1955. Table 14 shows the knockdown of TTR using the siRNAs. Data are expressed as the percent of message remaining relative to cells targeted with AD-1955.

[0389] Many but not all tiled TTR-dsRNAs, targeting TTR near the target of AD-18328, reduced TTR mRNA by at least 70% when transfected into Hep3B cells at 0.1 nM.

TABLE 14
Inhibition of TTR by tiled dsRNA targeting
TTR near target of AD-18328.

| | % message | | % message | |
|---|---|---|---|---|
| | remaining | % SD | remaining | % SD |
| Duplex # | 0.1 nM | 0.1 nM | 10 nM | 10 nM |
| AD-18323 | 6.7 | 1.90 | 1.7 | 0.02 |
| AD-18324 | 1.8 | 0.58 | 0.9 | 0.10 |
| AD-23000 | 5.5 | 0.93 | 2.1 | 0.87 |
| AD-23001 | 15.2 | 4.89 | 4.9 | 1.74 |
| AD-23002 | 3.1 | 1.12 | 1.4 | 0.55 |
| AD-23003 | 17.3 | 3.13 | 1.7 | 0.06 |
| AD-18325 | 1.5 | 0.27 | 1.4 | 0.66 |
| AD-23004 | 9.0 | 0.15 | 10.5 | 0.96 |
| AD-18326 | 22.0 | 1.85 | 7.6 | 0.78 |
| AD-18327 | 11.6 | 2.64 | 9.6 | 1.67 |
| AD-18328 | 1.1 | 0.70 | 0.6 | 0.16 |
| AD-23005 | 0.8 | 0.31 | 0.6 | 0.21 |
| AD-23006 | 1.5 | 0.46 | 1.2 | 0.43 |
| AD-23007 | 2.4 | 0.91 | 1.9 | 0.46 |
| AD-23008 | 0.6 | 0.10 | 0.8 | 0.26 |
| AD-23009 | 1.0 | 0.13 | 0.9 | 0.22 |
| AD-23010 | 60.1 | 15.66 | 66.2 | 22.71 |
| AD-23011 | 56.5 | 16.99 | 53.6 | 4.70 |
| AD-23012 | 7.7 | 2.36 | 7.7 | 3.25 |
| AD-23013 | 7.0 | 0.64 | 8.0 | 1.06 |
| AD-23014 | 0.7 | 0.01 | 0.6 | 0.10 |
| AD-23015 | 15.4 | 0.25 | 16.5 | 7.07 |
| AD-23016 | 27.1 | 0.37 | 6.7 | 1.80 |
| AD-23017 | 4.5 | 1.26 | 1.4 | 0.40 |
| AD-23018 | 44.6 | 9.45 | 7.5 | 1.09 |
| AD-23019 | 2.2 | 0.68 | 0.8 | 0.10 |
| AD-23020 | 52.7 | 6.45 | 29.7 | 1.17 |
| AD-23021 | 95.4 | 16.16 | 45.0 | 3.00 |
| AD-23022 | 70.1 | 3.01 | 60.8 | 12.11 |
| AD-23023 | 2.7 | 1.12 | 1.8 | 0.07 |
| AD-23024 | 1.7 | 0.30 | 1.8 | 0.33 |
| AD-23025 | 64.2 | 13.21 | 10.5 | 1.34 |
| AD-23026 | 1.9 | 0.15 | 1.9 | 0.78 |
| AD-23027 | 2.5 | 0.21 | 1.6 | 0.49 |
| AD-23028 | 6.7 | 4.41 | 1.2 | 0.50 |
| AD-18330 | 6.0 | 0.56 | 5.7 | 1.15 |
| AD-23029 | 4.5 | 0.47 | 1.6 | 0.10 |
| AD-23030 | 3.9 | 0.25 | 3.3 | 0.84 |
| AD-23031 | 3.4 | 0.78 | 1.7 | 0.02 |

### Example 15. Evaluation of Infusion Duration on Efficacy of a Single Intravenous Administration of SNALP-18534 in Sprague-Dawley Rats

[0390] Objectives

[0391] To determine the effect of infusion duration on efficacy of a single IV infusion of SNALP-18534 on liver TTR mRNA levels in Sprague-Dawley rats.

TABLE 15
Abbreviations and definitions used

| | |
|---|---|
| SNALP-18534 | Rodent transthyretin specific siRNA |
| | formulated in SNALP |
| SNALP-1955 | Non-mammalian luciferase specific |
| | siRNA formulated in SNALP |

[0392] The sequences of the sense and antisense strands of AD-18534 are reproduced below from the tables above:

| | | | | SEQ |
|---|---|---|---|---|
| | | | | ID |
| Strand | Oligo # | Position | Sequence 5′ to 3′ | NO: |
| S | A-32755 | 532 | cAGuGuucuuGcucuAuAAdTdT | 1289 |
| as | A-32756 | 550 | UuAuAGAGcAAGAAcACUGdTdT | 1290 |

[0393] Study Materials

[0394] Test Article(s)

[0395] SNALP-18534 is comprised of an siRNA targeting rodent TTR mRNA (AD-18534), formulated in stable nucleic acid lipid particles (SNALP) for delivery to target tissues. The SNALP formulation (lipid particle) consists of a novel aminolipid (DLinDMA), a PEGylated lipid (mPEG2000-C-DMA), a neutral lipid (DPPC) and cholesterol. The ratio of lipid:nucleic acid in the SNALP formulation is approximately 5.8:1 (w:w). SNALP-1955 contains an siRNA targeting the non-mammalian luciferase mRNA, is formulated with the identical lipid particle as SNALP-18534, and serves as a non-pharmacologically active control. Dose levels are expressed as mg/kg based on the weight of siRNA content.

[0396] Study Design & Procedures

[0397] Animals and Test Article Administration:

[0398] The study was comprised of 9 groups of Sprague-Dawley rats (4 males/group). The animals were allowed to have at least a 2 day acclimation period before the study and all animals were 7 weeks old at the initiation of dosing. The dose administered was calculated based upon body weight data collected prior to dosing on Day 1. The test and control articles were administered as a single 15-minute, 1-hour, 2-hour, or 3-hour IV infusion via the tail vein using a 24G ¾″ cannula sealed with a Baxter Injection Site septum connected via 27G Terumo butterfly needle to a Baxter AS40A Syringe Pump. The dose volume was 3 ml/kg, the infusion rate was 12 ml/kg/hr, and animals were freely moving in the cages during dosing. Rats were divided into nine treatment groups and administered a single IV infusion of SNALP-18534, SNALP-1955, or PBS as shown in Table 16:

TABLE 16
Test Animal Dosage Groups

| Group | N | Test Article | Infusion Duration | | Dose |
|---|---|---|---|---|---|
| A | 4 | PBS | 15 | minute | — |
| B | 4 | PBS | 3 | hour | — |
| C | 4 | SNALP -1955 | 1 | hour | 1 mg/kg |
| D | 4 | SNALP -1955 | 2 | hour | 1 mg/kg |
| E | 4 | SNALP -1955 | 3 | hour | 1 mg/kg |
| F | 4 | SNALP-18534 | 15 | minute | 1 mg/kg |
| G | 4 | SNALP-18534 | 1 | hour | 1 mg/kg |
| H | 4 | SNALP-18534 | 2 | hour | 1 mg/kg |
| I | 4 | SNALP-18534 | 3 | hour | 1 mg/kg |

[0399] Tissue Collection and RNA Isolation:

[0400] On Day 0, animals were anesthetized by isofluorane inhalation and pre-dosing blood samples were collected into serum separator tubes by retro-orbital bleed. The blood samples were allowed to clot at room temperature for approximately 30 minutes prior to centrifugation at 4° C. Serum samples were then stored at −80° C. until analysis was performed. On Day 3, animals in all nine treatment groups were given a lethal dose of ketamine/xylazine. Blood was collected via caudal vena cava into serum separation tubes, and then allowed to clot at room temperature for approximately 30 minutes prior to centrifugation at 4° C. Serum samples were stored at −80° C. until analysis was performed. Liver tissue was harvested and snap frozen on dry ice. Frozen liver tissue was ground and tissue lysates were prepared for liver mRNA quantitation.

[0401] TTR mRNA Quantitation:

[0402] TTR mRNA levels relative to those of GAPDH mRNA were determined in the lysates by using a branched DNA assay (QuantiGene Reagent System, Panomics, Fremont, CA). Briefly, the QuantiGene assay (Genospectra) was used to quantify mRNA levels in tissue sample lysates according to the manufacturer's instructions. The mean level of TTR mRNA was normalized to the mean level of GAPDH mRNA for each sample.

[0403] To obtain the relative level of TTR mRNA expression, group mean values for SNALP-1955 and SNALP-18534 treated groups with 15-minute, 1 hour and 2 hour infusion durations were then normalized to the mean value for the PBS treated group with 15-minute infusion whereas group mean values for SNALP-1955 and SNALP-18534 treated groups with 3 hour infusion duration were then normalized to the mean value for the PBS treated group with 3 hour infusion duration.

[0404] Results

[0405] As shown in FIG. 16, a single IV infusion of 1 mg/kg SNALP-18534 with different infusion durations of 15 minutes to 3 hours results in comparable inhibition of liver TTR mRNA levels measured two days after dosing. A single IV infusion of 1 mg/kg SNALP-18534 also showed durable TTR downregulation over 29 days following a single 15 minute IV infusion, as compared to SNALP-1955 control (data not shown). Compared to the PBS-treated group, a single 15-minute, 1-hour, 2-hour, or 3-hour IV infusion of SNALP-18534 at 1 mg/kg significantly reduced relative TTR mRNA expression levels by 94% (p<0.001), 94% (p<0.001), 92% (p<0.001) and 93% (p<0.001), respectively. Specificity of SNALP-18534 activity is demonstrated by lack of significant target inhibition by SNALP-1955 administration via 1-hour, 2-hour, or 3-hour IV infusion at the same dose level.

[0406] Conclusions

[0407] This study demonstrates that varying the infusion duration from 15 minutes to up to 3 hours does not affect the efficacy of a single IV administration of 1 mg/kg SNALP-18534 in rats, as assessed by reduction of TTR mRNA levels in the liver.

### Example 16. In Vivo Reduction of Wild-Type TTR mRNA in the Rat Liver by LNP07-18534 and LNP08-18534

[0408] To evaluate the efficacy of 2 novel lipid nanoparticle formulations, LNP07 and LNP08, for delivery of siRNA in the rat, the rodent-specific TTR siRNA, AD-18534, was formulated in LNP07 (LNP07-18534) or LNP08 (LNP08-18534), and administered by 15-minute IV infusion, and liver TTR mRNA was quantified. Sprague-Dawley rats (4 animals per group) were administered 15-minute IV infusions of LNP07-18534 (0.03, 0.1, 0.3 or 1 mg/kg), LNP08-18534 (0.01, 0.03 or 0.1 mg/kg), or LNP07-1955 (1 mg/kg) or LNP08-1955 (0.1 mg/kg) containing the negative control siRNA AD-1955 which targets the non-mammalian gene luciferase. Forty-eight hours later, animals were euthanized and liver tissue was collected, flash-frozen and stored at −80° C. until processing.

[0409] For TTR mRNA quantitation, frozen liver tissue was ground into powder, and lysates were prepared. TTR mRNA levels relative to those of GAPDH mRNA were determined in the lysates by using a branched DNA assay (QuantiGene Reagent System, Panomics, Fremont, CA). Briefly, the QuantiGene assay (Genospectra) was used to quantify mRNA levels in tissue sample lysates according to the manufacturer's instructions. The mean level of TTR mRNA was normalized to the mean level of GAPDH mRNA for each sample. Group means of the normalized values were then further normalized to the mean value for the PBS treated group, to obtain the relative level of TTR mRNA expression.

[0410] The results are shown in FIG. 17. LNP07-18534 reduced TTR mRNA levels in the liver in a dose-dependent manner, with 94% suppression of TTR mRNA at 1 mg/kg. The effect was specific, since the negative control LNP07-1955 at 1 mg/kg did not significantly affect TTR mRNA levels compared to the PBS control. The mRNA ED50 was determined to be˜0.05 mg/kg LNP07-18534. LNP08-18534 reduced TTR mRNA levels in the liver in a dose-dependent manner, with 86% suppression of TTR mRNA at 0.1 mg/kg. The effect was specific, since the negative control LNP08-1955 at 0.1 mg/kg did not significantly affect TTR mRNA levels compared to the PBS control. The mRNA ED50 was determined to be˜0.02 mg/kg LNP08-18534.

[0411] These results demonstrate that LNP07-18534 and LNP08-18534 are effective in suppressing wild-type TTR mRNA in the rat liver when administered by IV infusion, and that LNP07 and LNP08 are effective formulations for delivering siRNA to the liver.

### Example 17: Reduction of TTR Liver mRNA by a Single Intravenous Administration of LNP09-18534 or LNP11-18534 in Sprague-Dawley Rats

[0412] Objective:

[0413] To evaluate the efficacy of two novel lipid nanoparticle (LNP) formulations for delivery of the rodent TTR-specific siRNA, AD-18534 in the Sprague-Dawley rat for reducing endogenous (wild type) liver TTR mRNA levels. Rats were intravenously dosed via a 15 minute infusion with either 0.01, 0.03, 0.1, or 0.3 mg/kg LNP09-18534, LNP11-18534, or phosphate buffered saline (PBS) and TTR liver mRNA levels were assayed at 48 hrs post-treatment.

[0414] Material and Methods:

[0415] LNP09 formulation: (XTC/DSPC/Chol/PEG₂₀₀₀-C14)=50/10/38.5/1.5 mol %; Lipid:siRNA˜11:1. LNP11 formulation: (MC3/DSPC/Chol/PEG₂₀₀₀-C14)=50/10/38.5/1.5 mol %; Lipid:siRNA˜11.1

[0416] Tissue collection and RNA isolation: On Day 3, animals in all treatment groups were given a lethal dose of ketamine/xylazine. Blood was collected via caudal vena cava into serum separation tubes, and then allowed to clot at room temperature for approximately 30 minutes prior to centrifugation at 4° C. Serum samples were stored at −80° C. until for future analysis. Liver tissues were harvested and snap frozen on dry ice. Frozen liver tissue was ground and tissue lysates were prepared for liver mRNA quantitation.

[0417] TTR mRNA Quantitation: TTR mRNA levels relative to those of GAPDH mRNA were determined in the lysates by using a branched DNA assay (QuantiGene Reagent System, Panomics, Fremont, CA). Briefly, the QuantiGene assay (Genospectra) was used to quantify mRNA levels in tissue sample lysates according to the manufacturer's instructions. The mean level of TTR mRNA was normalized to the mean level of GAPDH mRNA for each sample. Group mean values were then normalized to the mean value for the PBS treated group, to obtain the relative level of TTR mRNA expression.

[0418] Results:

[0419] As shown in FIG. 18, in contrast with PBS treated animals, LNP09-18534 and LNP11-18534 treated animals had a significant dose-dependent decrease in TTR mRNA levels in the liver, reaching maximum reduction of ˜90% mRNA reduction for both LNP09 and LNP11 formulated groups, relative to PBC control group at 0.3 mg/kg, and a dose achieving 50% reduction (ED₅₀) of <0.03 mg/kg for LNP11-18534 and <0.1 mg/kg for LNP09-18534.

[0420] Conclusions

[0421] This study demonstrates that a single 15 minute IV infusion of LNP09-18534 or LNP11-18534 in Sprague-Dawley rats results in a dose-dependent reduction of liver TTR mRNA. These data demonstrate the efficacy of LNP09-18534 and LNP11-18534 in reducing endogenously expressed (wild type) TTR mRNA with ED50 levels of <0.03 and <0.1 mg/kg for LNP11-18534 and LNP09-18534, respectively.

### Example 18: Assaying for Toxicity in Animals

[0422] ALN-TTR01 was assayed for safety and toxiclogoy under non-GLP and GLP conditions. ALN-TTR01 is the siRNA AD-18328 in a SNALP formulation (DLinDMA/DPPC/Cholesterol/PEG2000-cDMA (57.1/7.1/34.4/1.4) lipid:siRNA˜7). Assays were performed in Cynomolgus monkey (1, 3, and 10 mg/kg) and Sprague-Dawley Rat (0.3, 1, 3, and 6 mg/kg). No toxicity of ALN-TTR01 was found at ≤1 mg/kg in rats and ≤3 mg/kg in NHP. (data not shown).

### Example 19: Drug Product ALN-TTR01

[0423] The drug product, ALN TTR01 Injection, is a white to off-white, homogeneous sterile liquid suspension of the siRNA ALN-18328 with lipid excipients (referred to as stable nucleic acid lipid particles [SNALP]) in isotonic phosphate buffered saline. The composition of ALN TTR01 is shown in the table below.

TABLE 17
Composition of drug product ALN-TTR01

| | Concen- | Per | |
|---|---|---|---|
| | tration | vial | |
| Component, grade | (mg/mL) | (mg) | Function |
| ALN-18328, cGMP | 2.0 | 11.0 | Active ingredient |
| DLinDMA | 7.3 | 40.2 | Novel excipient; |
| (1,2-Dilinoleyloxy- | | | titratable aminolipid |
| N,N-dimethyl-3- | | | for interaction with |
| aminopropane), cGMP | | | the active ingredient |
| PEG₂₀₀₀-C-DMA | 0.8 | 4.4 | Novel excipient; |
| (3 -N-[(ω-Methoxy | | | stability of drug |
| poly(ethylene glycol) | | | product and desired |
| 2000)carbamoyl]-1,2- | | | biodistribution |
| dimyristyloxy- | | | |
| propylamine), cGMP | | | |
| DPPC (R-1,2-Dipalmitoyl- | 1.1 | 6.1 | Structural integrity |
| sn-glycero-3- | | | of SNALP particles |
| phosphocholine), cGMP | | | |
| Cholesterol, synthetic, | 2.8 | 15.4 | Structural integrity |
| cGMP | | | of SNALP particles |
| Phosphate buffered | q. s. | to 5.5 | Buffer |
| saline, cGMP | | mL | |

[0424] The lipid excipients have the molecular weights and structures shown in the table below.

TABLE 18
Lipid excipients

| | Molecular | |
|---|---|---|
| Lipid | Weight | Chemical Name and Structure |
| DLinDMA | 616 | [chemical structure] 1,2-Dilinoleyloxy-N,N-dimethyl-3-aminopropane |
| PEG₂₀₀₀- CDMA^{a} | 2824 Poly- dispersity index 1.01 | [chemical structure] 3-N-[(ω-Methoxy poly(ethylene glycol)2000)carbamoyl]-1,2-dimyristyloxy-propylamine |
| DPPC | 734 | [chemical structure] 1,2-Dipalmitoyl-sn-glycero-3-phosphocholine |
| Cholesterol | 387 | [chemical structure] Cholest-5-en-3β-ol |

^{a}alternate name: mPEG₂₀₀₀-C-DMA

[0425] The ALN TTR01 drug product is packaged in 10 mL glass vials with a fill volume of 5.5 mL (11 mg ALN-18328 per vial). The container closure system consists of a USP/EP Type I borosilicate glass vial, a teflon faced butyl rubber stopper and an aluminum flip off cap. The drug product will be stored at 5±3° C.

[0426] Stability of the drug product is assayed for up to 24 months and determined using the following criteria:

[0427] Appearance: White to off-white, homogeneous opalescent liquid, no foreign particles

[0428] pH: 6.8-7.8

[0429] Osmolality: 250-350 mOsm/kg

[0430] Lipid: siRNA Ratio:5.6-8.4 mg/mg

[0431] Particle Size (Z-Average):60-120 nm≤0.15.

### Example 20: In Vitro Reduction of Human TTR mRNA Expression by AD-18324 in ARPE 19 Cells

[0432] To determine the effect of TTR siRNA on TTR mRNA expression in vitro, the siRNA AD-18324 and AD-18534 were tested in human retinal pigment epithelium (ARPE-19) cells. AD-18324 is a human TTR siRNA duplex and AD-18534 is a rat TTR siRNA duplex. The sequences of the sense and antisense strands of AD-18534 and AD-18324 are reproduced below:

| | | | | | SEQ |
|---|---|---|---|---|---|
| | | | Posi- | | ID |
| Duplex # | Strand | Oligo # | tion | Sequence 5′ to 3′ | NO: |
| AD-18534 | s | A-32755 | 532 | cAGuGuucuuGcucuAu | 1411 |
| | | | | AAdTdT | |
| | as | A-32756 | 550 | UuAuAGAGcAAGAAcAC | 1412 |
| | | | | UGdTdT | |
| AD-18324 | s | A-32337 | 509 | GGAuuucAuGuAAccAA | 1413 |
| | | | | GAdTdT | |
| | as | A-32338 | 527 | UCUUGGUuAcAUGAAAU | 1414 |
| | | | | CCdTdT | |

[0433] A control siRNA was AD-1955 targeting a LUC gene.

[0434] ARPE-19 cells were transfected with siRNA using Lipofectamin 2000 (Invitrogen). In some embodiments of this method, other transfection agents may be used, including cholesterol or aterocollagen. After incubation for 24 hrs, 50-60% confluent ARPE-19 cells were transiently transfected with AD-18534 or AD-18324 following manufacturer's instruction. Total RNA was isolated for real-time quantitative PCR 48 hrs after the start of transfection. ARPE-19 cells were dosed with 1 nM, 10 nM or 50 nM of AD-18534 or with 1 nM, 10 nM or 50 nM of AD-18324.

[0435] TTR mRNA expression was measured by real-time quantitative PCR. Total RNA was isolated from transfected cells by using RNeasy Mini Kit (Qiagen). Total RNA (0.5 μg) was reverse-transcribed to cDNA by using ExScript RT reagent (Takara Bio Inc.) according to the manufacturer's protocol. Each PCR was performed with 2 μL of the cDNA and 0.2 μmol/L of each primer in a LightCycler System with SYBR Premix DimerEraser (Takara Bio Inc.). The following primers were used: human TTR (forward: 5′-CATTCTTGGCAGGATGGCTTC-3′ (SEQ ID NO:1415); reverse: 5′-CTCCCAGGTGTCATCAGCAG-3′ (SEQ ID NO:1416). Human TTR mRNA expression was calculated relative to human GAPDH expression levels in the ARPE-19 cells.

[0436] Human TTR mRNA expression was markedly reduced by AD-18324 in a dose dependent manner. The results are shown in FIG. 22. A 1 nM dose of AD-18324 resulted in at least 10% reduction in human TTR mRNA relative expression compared to a control siRNA group. A 10 nM dose of AD-18324 resulted in at least 40% reduction in human TTR mRNA relative expression compared to the control siRNA group. A 50 nM dose of AD-18324 resulted in at least 60% reduction in human TTR mRNA relative expression compared to the control siRNA group. AD-18534 did not cause a marked reduction in human TTR relative expression at each dose. There was no effect on 11-6 or TNF-alpha levels compared to controls.

[0437] These results demonstrate that AD-18324 is effective in inhibiting human TTR mRNA expression in a human retinal pigment epithelium (ARPE-19) cell in a dose dependent manner and does not produce an inflammatory response.

### Example 21: In Vivo Reduction of Endogenous Rat TTR mRNA Expression by AD-18534 in Dark Agouti (DA) Rats

[0438] To determine the effect of rat TTR siRNA on endogenous rat TTR mRNA expression, the duplex AD-18534 was tested in vivo in Dark Agouti (DA) rats.

[0439] The sequences of the sense and antisense strands of AD-18534 are described above.

[0440] DA rats were injected with AD-18534 in their vitreous cavities. Adult rats were anesthetized by diethyl ether inhalation. To dilate the pupils, 1-2 drops of 1% tropicamide were applied to the rat's eyes. Intravitreal injections of siRNAs were made using Hamilton syringes and a 33 gauge needle. Injected volume was 5 μl so that vitreal volume is kept as close to normal as possible. After 24 hrs, the rat was sacrificed by diethyl ether inhalation and the eyes were harvested for subsequent dissection. The eyes were separated the cornea and lens to get the posterior cups. The RPE-choroid-sclera complexes were isolated by removing the retina from the posterior cups for analysis. Other methods may be used to optimize the siRNA delivery, including varying the amount of dose or timing of the dose. In some embodiments, the injection method may occur in another part of the eye, including the subconjunctival space or the subretina. In other embodiments, the amount of injected saline or siRNA may be increased.

[0441] Rat TTR mRNA expression was measured by real-time quantitative PCR (qPCR). Total RNA was isolated from each RPE-choroid-sclera complexes by using RNeasy Mini Kit (Qiagen). Total RNA was reverse-transcribed to cDNA by using ExScript RT reagent (Takara Bio Inc.). Each PCR was done in a LightCycler System with SYBR Premix DimerEraser (Takara Bio Inc.). The following primers were used: rat TTR (forward: 5′-TGCCTCGCTGGACTGATATTTG-3′ (SEQ ID NO:1417); reverse: 5′-TTGAACACTTTCACGGCCACA-3′ (SEQ ID NO:1418)). Rat TTR mRNA expression was calculated relative to rat GAPDH expression levels.

[0442] FIG. 23 shows the inhibition of endogenous rat TTR mRNA expression in DA rats after injection with AD-18534, compared to DA rats that were administered a control siRNA, saline, or no treatment (p<0.01). DA rats treated with AD-18354 exhibited a reduction in endogenous rat TTR mRNA expression by at least 60% relative to the control siRNA group and the saline control group (p<0.01).

[0443] These results demonstrate that AD-18354 is active in suppressing endogenous rat TTR mRNA expression in the retinal pigment epithelium cells of DA rats.

### Example 22: In Vivo Reduction of ATTR mRNA Expression by AD-18324 in ATTR V30M Transgenic (Tg) Rats

[0444] To evaluate the effect of TTR siRNA AD-18324 on human mutant (V30M) ATTR mRNA expression, AD-18324 was tested in vivo in retinal pigment epithelium cells of ATTR V30M Transgenic (Tg) rats.

[0445] Transgenic rats possessing a human ATTR V30M gene were injected with AD-18324 in their vitreous cavities. Intravitreal injections of AD-18324 siRNA were made using Hamilton syringes and 33 gauge needle. After 24 hrs, the ATTR V30M Tg rats were sacrificed by diethyl ether inhalation and the eyes were harvested for subsequent dissection. The eyes were separated the cornea and lens to get the posterior cups. The RPE-choroid-sclera complexes were isolated by removing the retina from the posterior cups to evaluate the effect of AD-18324 on ATTR mRNA expression. AD-18324 siRNA was injected into the vitreous cavity using a 33 gauge needle. After 24 hours, the retinal pigment epithelium was isolated to evaluate the effect of AD-18324 on ATTR mRNA expression.

[0446] ATTR mRNA expression was measured by real-time PCR. Total RNA was reverse-transcribed to cDNA by using ExScript RT reagent (Takara Bio Inc.). Each PCR was done in a LightCycler System with Premix Ex Taq (Takara Bio Inc.). The following primers were used: human TTR (forward: 5′-GCCGTGCATGTGTTCAGA-3′ (SEQ ID NO:1419); reverse: 5′-GCTCTCCAGACTCACTGGTTTT-3 (SEQ ID NO:1420)′). The probe was provided by Universal Probe Library (probe #66, Roche Diagnostics). ATTR mRNA expression was calculated relative to rat GAPDH expression in the ATTR V30M Tg rat.

[0447] FIG. 24 shows a significant reduction of ATTR mRNA expression in RPE cells of ATTR V30M Tg rats, compared to the control siRNA group, the saline group, and the no treatment group. ATTR mRNA expression was reduced by at least 60% compared to the no treatment group.

[0448] Western blot analysis was used to assess ATTR protein expression. Equal amounts of aqueous humor protein from rats were fractionated via 12% SDS-PAGE and transferred to nitrocellulose membranes (Bio-Rad Laboratories). Membranes were blocked with 2.5% non-fat milk and incubated overnight at 4° C. with a primary antibody which was a rabbit polyclonal anti-TTR (dilution 1:1000, Dako), followed by a horseradish peroxidase-conjugated goat anti-rabbit immunoglobulin antibody (dilution 1:1000, Dako) as a secondary reaction for 1 hour at room temperature. The immunocomplex was visualized using the ECL western blot detection system (GE Healthcare Bio-Science).

[0449] The results are shown in FIG. 25. ATTR protein expression was significantly reduced by AD-18324 compared to ATTR protein expression after injection of a control siRNA.

[0450] These results demonstrate that intravitreal injection of AD-18324 in ATTR V30M Tg rats significantly reduces human TTR mRNA and protein expression in the RPE.

### Example 23: In Vivo Reduction of Endogenous Rat TTR mRNA Expression in Dark Agouti (DA) Rats Using Cholesterol Conjugated AD-18534

[0451] To determine the effect of cholesterol-conjugated rat TTR siRNA on endogenous rat TTR mRNA expression, the duplex AD-23043 was tested in vivo in Dark Agouti (DA) rats.

[0452] AD-23043 is a cholesterol conjugated siRNA with the following sequences.

| | | | SEQ |
|---|---|---|---|
| | | | ID |
| Duplex # | Strand | Sequence 5′ to 3′ | NO: |
| AD-23043 | sense | cAGuGuucuuGcucuAuAAdTdTsL10 | 1421 |
| | antisense | UuAuAGAGcAAGAAcACUGdTdT | 1422 |

[0453] DA rats were injected with AD-23043 in their vitreous cavities. Adult rats were anesthetized by diethyl ether inhalation. To dilate the pupils, 1-2 drops of 1% tropicamide were applied to the rat's eyes. Intravitreal injections of siRNAs (5 μg) were made using Hamilton syringes and a 33 gauge needle. Injected volume was 5 μl so that vitreal volume is kept as close to normal as possible. After 14 or 21 days, the rat was sacrificed by diethyl ether inhalation and the eyes were harvested for subsequent dissection. The eyes were separated the cornea and lens to get the posterior cups. The RPE-choroid-sclera complexes were isolated by removing the retina from the posterior cups for analysis.

[0454] Rat TTR mRNA expression was measured by real-time quantitative PCR (qPCR). Total RNA was isolated from each RPE-choroid-sclera complexes by using RNeasy Mini Kit (Qiagen). Total RNA was reverse-transcribed to cDNA by using ExScript RT reagent (Takara Bio Inc.). Each PCR was done in a LightCycler System with SYBR Premix DimerEraser (Takara Bio Inc.). The following primers were used: rat TTR (forward: 5′-TGCCTCGCTGGACTGATATTTG-3′ (SEQ ID NO:1423); reverse: 5′-TTGAACACTTTCACGGCCACA-3′ (SEQ ID NO:1424)). Rat TTR mRNA expression was calculated relative to rat GAPDH expression levels.

[0455] The results are shown in FIG. 26 and FIG. 27. Cholesterol conjugated siRNA targeting rat TTR reduced endogenous rat TTR expression by about 40% compared to a control siRNA.

### Example 24: Treatment of Ocular Amyloidosis in Human

[0456] For treatment of ocular amyloidosis in humans, the pharmaceutical compositions used in the present invention may be administered in a number of ways depending upon the invasiveness of treatment and based on whether local or systemic treatment is desired. The preferred initial treatment may be performed by ocular instillation, ointment, peroral administration or infusion. Parenteral administration includes subcutaneous eyelid, subconjunctival injection, subtenon injection, retrobulbar injection, anterior chamber injection, intravitreous injection or ophthalmovascular injection.

| Informal Sequence Listing | |
|---|---|
| >NM_000371.2 Homo sapiens transthyretin (TTR), mRNA | |
| SEQ ID NO: 1329 | |
| acagaagtcc actcattctt ggcaggatgg cttctcatcg tctgctcctc ctctgccttg | 60 |
| ctggactggt atttgtgtct gaggctggcc ctacgggcac cggtgaatcc aagtgtcctc | 120 |
| tgatggtcaa agttctagat gctgtccgag gcagtcctgc catcaatgtg gccgtgcatg | 180 |
| tgttcagaaa ggctgctgat gacacctggg agccatttgc ctctgggaaa accagtgagt | 240 |
| ctggagagct gcatgggctc acaactgagg aggaatttgt agaagggata tacaaagtgg | 300 |
| aaatagacac caaatcttac tggaaggcac ttggcatctc cccattccat gagcatgcag | 360 |
| aggtggtatt cacagccaac gactccggcc cccgccgcta caccattgcc gccctgctga | 420 |
| gcccctactc ctattccacc acggctgtcg tcaccaatcc caaggaatga gggacttctc | 480 |
| ctccagtgga cctgaaggac gagggatggg atttcatgta accaagagta ttccattttt | 540 |
| actaaagcag tgttttcacc tcatatgcta tgttagaagt ccaggcagag acaataaaac | 600 |
| attcctgtga aaggcacttt tcattccaaa aaaaaaaaaa aaaaaaaaaa | 650 |
| >NM_012681.1 Rattus norvegicus transthyretin (Ttir), mRNA | |
| SEQ ID NO: 1330 | |
| cctgacagga tggcttccct tcgcctgttc ctcctctgcc tcgctggact gatatttgcg | 60 |
| tctgaagctg gccctggggg tgctggagaa tccaagtgtc ctctgatggt caaagtcctg | 120 |
| gatgctgtcc gaggcagccc tgctgtcgat gtggccgtga aagtgttcaa aaggactgca | 180 |
| gacggaagct gggagccgtt tgcctctggg aagaccgccg agtctggaga gctgcacggg | 240 |
| ctcaccacag atgagaagtt cacggaaggg gtgtacaggg tagaactgga caccaaatca | 300 |
| tactggaagg ctcttggcat ttccccattc catgaatacg cagaggtggt tttcacagcc | 360 |
| aatgactctg gtcatcgcca ctacaccatc gcagccctgc tcagcccgta ctcctacagc | 420 |
| accactgctg tcgtcagtaa cccccagaac tgagggaccc agcccacgag gaccaagatc | 480 |
| ttgccaaagc agtagctccc atttgtactg aaacagtgtt cttgctctat aaaccgtgtt | 540 |
| agcaactcgg gaagatgccg tgaaacgttc ttattaaacc acctttattt cattc | 595 |
| >NM_000371.3 Homo sapiens transthyretin (TTR), mRNA | |
| SEQ ID NO: 1331 | |
| gttgactaag tcaataatca gaatcagcag gtttgcagtc agattggcag ggataagcag | 60 |
| cctagctcag gagaagtgag tataaaagcc ccaggctggg agcagccatc acagaagtcc | 120 |
| actcattctt ggcaggatgg cttctcatcg tctgctcctc ctctgccttg ctggactggt | 180 |
| atttgtgtct gaggctggcc ctacgggcac cggtgaatcc aagtgtcctc tgatggtcaa | 240 |
| agttctagat gctgtccgag gcagtcctgc catcaatgtg gccgtgcatg tgttcagaaa | 300 |
| ggctgctgat gacacctggg agccatttgc ctctgggaaa accagtgagt ctggagagct | 360 |
| gcatgggctc acaactgagg aggaatttgt agaagggata tacaaagtgg aaatagacac | 420 |
| caaatcttac tggaaggcac ttggcatctc cccattccat gagcatgcag aggtggtatt | 480 |
| cacagccaac gactccggcc cccgccgcta caccattgcc gccctgctga gcccctactc | 540 |
| ctattccacc acggctgtcg tcaccaatcc caaggaatga gggacttctc ctccagtgga | 600 |
| cctgaaggac gagggatggg atttcatgta accaagagta ttccattttt actaaagcag | 660 |
| tgttttcacc tcatatgcta tgttagaagt ccaggcagag acaataaaac attcctgtga | 720 |
| aaggcacttt tcattccact ttaacttgat tttttaaatt cccttattgt cccttccaaa | 780 |
| aaaaagagaa tcaaaatttt acaaagaatc aaaggaattc tagaaagtat ctgggcagaa | 840 |
| cgctaggaga gatccaaatt tccattgtct tgcaagcaaa gcacgtatta aatatgatct | 900 |
| gcagccatta aaaagacaca ttctgtaaaa aaaaaaaa | 938 |
| SEQ ID NO: 1410 | |
| gtaaccaa gagtattccat | |

The application's sequence listing, which the Patent Office published only in electronic form, follows.

SEQUENCE LISTING (1424 sequences)

SEQ ID NO: 1 - RNA, 19 nt, synthetic construct
  source 1..19: mol_type = other RNA; note = Description of Artificial Sequence: Synthetic oligonucleotide
ccggtgaatccaagtgtcc

SEQ ID NO: 2 - RNA, 19 nt, synthetic construct
  source 1..19: mol_type = other RNA; note = Description of Artificial Sequence: Synthetic oligonucleotide
ggacacttggattcaccgg

SEQ ID NO: 3 - RNA, 19 nt, synthetic construct
  source 1..19: mol_type = other RNA; note = Description of Artificial Sequence: Synthetic oligonucleotide
actcattcttggcaggatg

SEQ ID NO: 4 - RNA, 19 nt, synthetic construct
  source 1..19: mol_type = other RNA; note = Description of Artificial Sequence: Synthetic oligonucleotide
catcctgccaagaatgagt

SEQ ID NO: 5 - RNA, 19 nt, synthetic construct
  source 1..19: mol_type = other RNA; note = Description of Artificial Sequence: Synthetic oligonucleotide
aagtgtcctctgatggtca

SEQ ID NO: 6 - RNA, 19 nt, synthetic construct
  source 1..19: mol_type = other RNA; note = Description of Artificial Sequence: Synthetic oligonucleotide
tgaccatcagaggacactt

SEQ ID NO: 7 - RNA, 19 nt, synthetic construct
  source 1..19: mol_type = other RNA; note = Description of Artificial Sequence: Synthetic oligonucleotide
tcattcttggcaggatggc

SEQ ID NO: 8 - RNA, 19 nt, synthetic construct
  source 1..19: mol_type = other RNA; note = Description of Artificial Sequence: Synthetic oligonucleotide
gccatcctgccaagaatga

SEQ ID NO: 9 - RNA, 19 nt, synthetic construct
  source 1..19: mol_type = other RNA; note = Description of Artificial Sequence: Synthetic oligonucleotide
aagttctagatgctgtccg

SEQ ID NO: 10 - RNA, 19 nt, synthetic construct
  source 1..19: mol_type = other RNA; note = Description of Artificial Sequence: Synthetic oligonucleotide
cggacagcatctagaactt

SEQ ID NO: 11 - RNA, 19 nt, synthetic construct
  source 1..19: mol_type = other RNA; note = Description of Artificial Sequence: Synthetic oligonucleotide
gttctagatgctgtccgag

SEQ ID NO: 12 - RNA, 19 nt, synthetic construct
  source 1..19: mol_type = other RNA; note = Description of Artificial Sequence: Synthetic oligonucleotide
ctcggacagcatctagaac

SEQ ID NO: 13 - RNA, 19 nt, synthetic construct
  source 1..19: mol_type = other RNA; note = Description of Artificial Sequence: Synthetic oligonucleotide
ctagatgctgtccgaggca

SEQ ID NO: 14 - RNA, 19 nt, synthetic construct
  source 1..19: mol_type = other RNA; note = Description of Artificial Sequence: Synthetic oligonucleotide
tgcctcggacagcatctag

SEQ ID NO: 15 - RNA, 19 nt, synthetic construct
  source 1..19: mol_type = other RNA; note = Description of Artificial Sequence: Synthetic oligonucleotide
gatgctgtccgaggcagtc

SEQ ID NO: 16 - RNA, 19 nt, synthetic construct
  source 1..19: mol_type = other RNA; note = Description of Artificial Sequence: Synthetic oligonucleotide
gactgcctcggacagcatc

SEQ ID NO: 17 - RNA, 19 nt, synthetic construct
  source 1..19: mol_type = other RNA; note = Description of Artificial Sequence: Synthetic oligonucleotide
cattcttggcaggatggct

SEQ ID NO: 18 - RNA, 19 nt, synthetic construct
  source 1..19: mol_type = other RNA; note = Description of Artificial Sequence: Synthetic oligonucleotide
agccatcctgccaagaatg

SEQ ID NO: 19 - RNA, 19 nt, synthetic construct
  source 1..19: mol_type = other RNA; note = Description of Artificial Sequence: Synthetic oligonucleotide
tgctgtccgaggcagtcct

SEQ ID NO: 20 - RNA, 19 nt, synthetic construct
  source 1..19: mol_type = other RNA; note = Description of Artificial Sequence: Synthetic oligonucleotide
aggactgcctcggacagca

SEQ ID NO: 21 - RNA, 19 nt, synthetic construct
  source 1..19: mol_type = other RNA; note = Description of Artificial Sequence: Synthetic oligonucleotide
ccgaggcagtcctgccatc

SEQ ID NO: 22 - RNA, 19 nt, synthetic construct
  source 1..19: mol_type = other RNA; note = Description of Artificial Sequence: Synthetic oligonucleotide
gatggcaggactgcctcgg

SEQ ID NO: 23 - RNA, 19 nt, synthetic construct
  source 1..19: mol_type = other RNA; note = Description of Artificial Sequence: Synthetic oligonucleotide
cagtcctgccatcaatgtg

SEQ ID NO: 24 - RNA, 19 nt, synthetic construct
  source 1..19: mol_type = other RNA; note = Description of Artificial Sequence: Synthetic oligonucleotide
cacattgatggcaggactg

SEQ ID NO: 25 - RNA, 19 nt, synthetic construct
  source 1..19: mol_type = other RNA; note = Description of Artificial Sequence: Synthetic oligonucleotide
caatgtggccgtgcatgtg

SEQ ID NO: 26 - RNA, 19 nt, synthetic construct
  source 1..19: mol_type = other RNA; note = Description of Artificial Sequence: Synthetic oligonucleotide
cacatgcacggccacattg

SEQ ID NO: 27 - RNA, 19 nt, synthetic construct
  source 1..19: mol_type = other RNA; note = Description of Artificial Sequence: Synthetic oligonucleotide
atgtgttcagaaaggctgc

SEQ ID NO: 28 - RNA, 19 nt, synthetic construct
  source 1..19: mol_type = other RNA; note = Description of Artificial Sequence: Synthetic oligonucleotide
gcagcctttctgaacacat

SEQ ID NO: 29 - RNA, 19 nt, synthetic construct
  source 1..19: mol_type = other RNA; note = Description of Artificial Sequence: Synthetic oligonucleotide
cagaagtccactcattctt

SEQ ID NO: 30 - RNA, 19 nt, synthetic construct
  source 1..19: mol_type = other RNA; note = Description of Artificial Sequence: Synthetic oligonucleotide
aagaatgagtggacttctg

SEQ ID NO: 31 - RNA, 19 nt, synthetic construct
  source 1..19: mol_type = other RNA; note = Description of Artificial Sequence: Synthetic oligonucleotide
ggcaggatggcttctcatc

SEQ ID NO: 32 - RNA, 19 nt, synthetic construct
  source 1..19: mol_type = other RNA; note = Description of Artificial Sequence: Synthetic oligonucleotide
gatgagaagccatcctgcc

SEQ ID NO: 33 - RNA, 19 nt, synthetic construct
  source 1..19: mol_type = other RNA; note = Description of Artificial Sequence: Synthetic oligonucleotide
gagccatttgcctctggga

SEQ ID NO: 34 - RNA, 19 nt, synthetic construct
  source 1..19: mol_type = other RNA; note = Description of Artificial Sequence: Synthetic oligonucleotide
tcccagaggcaaatggctc

SEQ ID NO: 35 - RNA, 19 nt, synthetic construct
  source 1..19: mol_type = other RNA; note = Description of Artificial Sequence: Synthetic oligonucleotide
caggatggcttctcatcgt

SEQ ID NO: 36 - RNA, 19 nt, synthetic construct
  source 1..19: mol_type = other RNA; note = Description of Artificial Sequence: Synthetic oligonucleotide
acgatgagaagccatcctg

SEQ ID NO: 37 - RNA, 19 nt, synthetic construct
  source 1..19: mol_type = other RNA; note = Description of Artificial Sequence: Synthetic oligonucleotide
aggatggcttctcatcgtc

SEQ ID NO: 38 - RNA, 19 nt, synthetic construct
  source 1..19: mol_type = other RNA; note = Description of Artificial Sequence: Synthetic oligonucleotide
gacgatgagaagccatcct

SEQ ID NO: 39 - RNA, 19 nt, synthetic construct
  source 1..19: mol_type = other RNA; note = Description of Artificial Sequence: Synthetic oligonucleotide
agagctgcatgggctcaca

SEQ ID NO: 40 - RNA, 19 nt, synthetic construct
  source 1..19: mol_type = other RNA; note = Description of Artificial Sequence: Synthetic oligonucleotide
tgtgagcccatgcagctct

SEQ ID NO: 41 - RNA, 19 nt, synthetic construct
  source 1..19: mol_type = other RNA; note = Description of Artificial Sequence: Synthetic oligonucleotide
gctgcatgggctcacaact

SEQ ID NO: 42 - RNA, 19 nt, synthetic construct
  source 1..19: mol_type = other RNA; note = Description of Artificial Sequence: Synthetic oligonucleotide
agttgtgagcccatgcagc

SEQ ID NO: 43 - RNA, 19 nt, synthetic construct
  source 1..19: mol_type = other RNA; note = Description of Artificial Sequence: Synthetic oligonucleotide
ggatggcttctcatcgtct

SEQ ID NO: 44 - RNA, 19 nt, synthetic construct
  source 1..19: mol_type = other RNA; note = Description of Artificial Sequence: Synthetic oligonucleotide
agacgatgagaagccatcc

SEQ ID NO: 45 - RNA, 19 nt, synthetic construct
  source 1..19: mol_type = other RNA; note = Description of Artificial Sequence: Synthetic oligonucleotide
gcatgggctcacaactgag

SEQ ID NO: 46 - RNA, 19 nt, synthetic construct
  source 1..19: mol_type = other RNA; note = Description of Artificial Sequence: Synthetic oligonucleotide
ctcagttgtgagcccatgc

SEQ ID NO: 47 - RNA, 19 nt, synthetic construct
  source 1..19: mol_type = other RNA; note = Description of Artificial Sequence: Synthetic oligonucleotide
atgggctcacaactgagga

SEQ ID NO: 48 - RNA, 19 nt, synthetic construct
  source 1..19: mol_type = other RNA; note = Description of Artificial Sequence: Synthetic oligonucleotide
tcctcagttgtgagcccat

SEQ ID NO: 49 - RNA, 19 nt, synthetic construct
  source 1..19: mol_type = other RNA; note = Description of Artificial Sequence: Synthetic oligonucleotide
tgggctcacaactgaggag

SEQ ID NO: 50 - RNA, 19 nt, synthetic construct
  source 1..19: mol_type = other RNA; note = Description of Artificial Sequence: Synthetic oligonucleotide
ctcctcagttgtgagccca

SEQ ID NO: 51 - RNA, 19 nt, synthetic construct
  source 1..19: mol_type = other RNA; note = Description of Artificial Sequence: Synthetic oligonucleotide
gaggaatttgtagaaggga

SEQ ID NO: 52 - RNA, 19 nt, synthetic construct
  source 1..19: mol_type = other RNA; note = Description of Artificial Sequence: Synthetic oligonucleotide
tcccttctacaaattcctc

SEQ ID NO: 53 - RNA, 19 nt, synthetic construct
  source 1..19: mol_type = other RNA; note = Description of Artificial Sequence: Synthetic oligonucleotide
tttgtagaagggatataca

SEQ ID NO: 54 - RNA, 19 nt, synthetic construct
  source 1..19: mol_type = other RNA; note = Description of Artificial Sequence: Synthetic oligonucleotide
tgtatatcccttctacaaa

SEQ ID NO: 55 - RNA, 19 nt, synthetic construct
  source 1..19: mol_type = other RNA; note = Description of Artificial Sequence: Synthetic oligonucleotide
ttgtagaagggatatacaa

SEQ ID NO: 56 - RNA, 19 nt, synthetic construct
  source 1..19: mol_type = other RNA; note = Description of Artificial Sequence: Synthetic oligonucleotide
ttgtatatcccttctacaa

SEQ ID NO: 57 - RNA, 19 nt, synthetic construct
  source 1..19: mol_type = other RNA; note = Description of Artificial Sequence: Synthetic oligonucleotide
tgtagaagggatatacaaa

SEQ ID NO: 58 - RNA, 19 nt, synthetic construct
  source 1..19: mol_type = other RNA; note = Description of Artificial Sequence: Synthetic oligonucleotide
tttgtatatcccttctaca

SEQ ID NO: 59 - RNA, 19 nt, synthetic construct
  source 1..19: mol_type = other RNA; note = Description of Artificial Sequence: Synthetic oligonucleotide
agaagggatatacaaagtg

SEQ ID NO: 60 - RNA, 19 nt, synthetic construct
  source 1..19: mol_type = other RNA; note = Description of Artificial Sequence: Synthetic oligonucleotide
cactttgtatatcccttct

SEQ ID NO: 61 - RNA, 19 nt, synthetic construct
  source 1..19: mol_type = other RNA; note = Description of Artificial Sequence: Synthetic oligonucleotide
aagtggaaatagacaccaa

SEQ ID NO: 62 - RNA, 19 nt, synthetic construct
  source 1..19: mol_type = other RNA; note = Description of Artificial Sequence: Synthetic oligonucleotide
ttggtgtctatttccactt

SEQ ID NO: 63 - RNA, 19 nt, synthetic construct
  source 1..19: mol_type = other RNA; note = Description of Artificial Sequence: Synthetic oligonucleotide
ggaaatagacaccaaatct

SEQ ID NO: 64 - RNA, 19 nt, synthetic construct
  source 1..19: mol_type = other RNA; note = Description of Artificial Sequence: Synthetic oligonucleotide
agatttggtgtctatttcc

SEQ ID NO: 65 - RNA, 19 nt, synthetic construct
  source 1..19: mol_type = other RNA; note = Description of Artificial Sequence: Synthetic oligonucleotide
gaaatagacaccaaatctt

SEQ ID NO: 66 - RNA, 19 nt, synthetic construct
  source 1..19: mol_type = other RNA; note = Description of Artificial Sequence: Synthetic oligonucleotide
aagatttggtgtctatttc

SEQ ID NO: 67 - RNA, 19 nt, synthetic construct
  source 1..19: mol_type = other RNA; note = Description of Artificial Sequence: Synthetic oligonucleotide
atagacaccaaatcttact

SEQ ID NO: 68 - RNA, 19 nt, synthetic construct
  source 1..19: mol_type = other RNA; note = Description of Artificial Sequence: Synthetic oligonucleotide
agtaagatttggtgtctat

SEQ ID NO: 69 - RNA, 19 nt, synthetic construct
  source 1..19: mol_type = other RNA; note = Description of Artificial Sequence: Synthetic oligonucleotide
tagacaccaaatcttactg

SEQ ID NO: 70 - RNA, 19 nt, synthetic construct
  source 1..19: mol_type = other RNA; note = Description of Artificial Sequence: Synthetic oligonucleotide
cagtaagatttggtgtcta

SEQ ID NO: 71 - RNA, 19 nt, synthetic construct
  source 1..19: mol_type = other RNA; note = Description of Artificial Sequence: Synthetic oligonucleotide
agacaccaaatcttactgg

SEQ ID NO: 72 - RNA, 19 nt, synthetic construct
  source 1..19: mol_type = other RNA; note = Description of Artificial Sequence: Synthetic oligonucleotide
ccagtaagatttggtgtct

SEQ ID NO: 73 - RNA, 19 nt, synthetic construct
  source 1..19: mol_type = other RNA; note = Description of Artificial Sequence: Synthetic oligonucleotide
ttactggaaggcacttggc

SEQ ID NO: 74 - RNA, 19 nt, synthetic construct
  source 1..19: mol_type = other RNA; note = Description of Artificial Sequence: Synthetic oligonucleotide
gccaagtgccttccagtaa

SEQ ID NO: 75 - RNA, 19 nt, synthetic construct
  source 1..19: mol_type = other RNA; note = Description of Artificial Sequence: Synthetic oligonucleotide
ttctcatcgtctgctcctc

SEQ ID NO: 76 - RNA, 19 nt, synthetic construct
  source 1..19: mol_type = other RNA; note = Description of Artificial Sequence: Synthetic oligonucleotide
gaggagcagacgatgagaa

SEQ ID NO: 77 - RNA, 19 nt, synthetic construct
  source 1..19: mol_type = other RNA; note = Description of Artificial Sequence: Synthetic oligonucleotide
ggaaggcacttggcatctc

SEQ ID NO: 78 - RNA, 19 nt, synthetic construct
  source 1..19: mol_type = other RNA; note = Description of Artificial Sequence: Synthetic oligonucleotide
gagatgccaagtgccttcc

SEQ ID NO: 79 - RNA, 19 nt, synthetic construct
  source 1..19: mol_type = other RNA; note = Description of Artificial Sequence: Synthetic oligonucleotide
ggcacttggcatctcccca

SEQ ID NO: 80 - RNA, 19 nt, synthetic construct
  source 1..19: mol_type = other RNA; note = Description of Artificial Sequence: Synthetic oligonucleotide
tggggagatgccaagtgcc

SEQ ID NO: 81 - RNA, 19 nt, synthetic construct
  source 1..19: mol_type = other RNA; note = Description of Artificial Sequence: Synthetic oligonucleotide
ggcatctccccattccatg

SEQ ID NO: 82 - DNA, 20 bp, synthetic construct
  source 1..20: mol_type = other DNA; note = Description of Artificial Sequence: Synthetic oligonucleotide; note = Description of Combined DNA/RNA Molecule: Synthetic oligonucleotide
  misc_feature 1..18: note = RNA
  misc_feature 19..20: note = DNA
atggaatggggagatgcctt

SEQ ID NO: 83 - RNA, 19 nt, synthetic construct
  source 1..19: mol_type = other RNA; note = Description of Artificial Sequence: Synthetic oligonucleotide
gcatctccccattccatga

SEQ ID NO: 84 - RNA, 19 nt, synthetic construct
  source 1..19: mol_type = other RNA; note = Description of Artificial Sequence: Synthetic oligonucleotide
tcatggaatggggagatgc

SEQ ID NO: 85 - RNA, 19 nt, synthetic construct
  source 1..19: mol_type = other RNA; note = Description of Artificial Sequence: Synthetic oligonucleotide
catctccccattccatgag

SEQ ID NO: 86 - RNA, 19 nt, synthetic construct
  source 1..19: mol_type = other RNA; note = Description of Artificial Sequence: Synthetic oligonucleotide
ctcatggaatggggagatg

SEQ ID NO: 87 - RNA, 19 nt, synthetic construct
  source 1..19: mol_type = other RNA; note = Description of Artificial Sequence: Synthetic oligonucleotide
atctccccattccatgagc

SEQ ID NO: 88 - RNA, 19 nt, synthetic construct
  source 1..19: mol_type = other RNA; note = Description of Artificial Sequence: Synthetic oligonucleotide
gctcatggaatggggagat

SEQ ID NO: 89 - RNA, 19 nt, synthetic construct
  source 1..19: mol_type = other RNA; note = Description of Artificial Sequence: Synthetic oligonucleotide
ctccccattccatgagcat

SEQ ID NO: 90 - RNA, 19 nt, synthetic construct
  source 1..19: mol_type = other RNA; note = Description of Artificial Sequence: Synthetic oligonucleotide
atgctcatggaatggggag

SEQ ID NO: 91 - RNA, 19 nt, synthetic construct
  source 1..19: mol_type = other RNA; note = Description of Artificial Sequence: Synthetic oligonucleotide
cccattccatgagcatgca

SEQ ID NO: 92 - RNA, 19 nt, synthetic construct
  source 1..19: mol_type = other RNA; note = Description of Artificial Sequence: Synthetic oligonucleotide
tgcatgctcatggaatggg

SEQ ID NO: 93 - RNA, 19 nt, synthetic construct
  source 1..19: mol_type = other RNA; note = Description of Artificial Sequence: Synthetic oligonucleotide
ccatgagcatgcagaggtg

SEQ ID NO: 94 - RNA, 19 nt, synthetic construct
  source 1..19: mol_type = other RNA; note = Description of Artificial Sequence: Synthetic oligonucleotide
cacctctgcatgctcatgg

SEQ ID NO: 95 - RNA, 19 nt, synthetic construct
  source 1..19: mol_type = other RNA; note = Description of Artificial Sequence: Synthetic oligonucleotide
agcatgcagaggtggtatt

SEQ ID NO: 96 - RNA, 19 nt, synthetic construct
  source 1..19: mol_type = other RNA; note = Description of Artificial Sequence: Synthetic oligonucleotide
aataccacctctgcatgct

SEQ ID NO: 97 - RNA, 19 nt, synthetic construct
  source 1..19: mol_type = other RNA; note = Description of Artificial Sequence: Synthetic oligonucleotide
catgcagaggtggtattca

SEQ ID NO: 98 - RNA, 19 nt, synthetic construct
  source 1..19: mol_type = other RNA; note = Description of Artificial Sequence: Synthetic oligonucleotide
tgaataccacctctgcatg

SEQ ID NO: 99 - RNA, 19 nt, synthetic construct
  source 1..19: mol_type = other RNA; note = Description of Artificial Sequence: Synthetic oligonucleotide
atgcagaggtggtattcac

SEQ ID NO: 100 - RNA, 19 nt, synthetic construct
  source 1..19: mol_type = other RNA; note = Description of Artificial Sequence: Synthetic oligonucleotide
gtgaataccacctctgcat

SEQ ID NO: 101 - RNA, 19 nt, synthetic construct
  source 1..19: mol_type = other RNA; note = Description of Artificial Sequence: Synthetic oligonucleotide
ggtggtattcacagccaac

SEQ ID NO: 102 - RNA, 19 nt, synthetic construct
  source 1..19: mol_type = other RNA; note = Description of Artificial Sequence: Synthetic oligonucleotide
gttggctgtgaataccacc

SEQ ID NO: 103 - RNA, 19 nt, synthetic construct
  source 1..19: mol_type = other RNA; note = Description of Artificial Sequence: Synthetic oligonucleotide
gtggtattcacagccaacg

SEQ ID NO: 104 - RNA, 19 nt, synthetic construct
  source 1..19: mol_type = other RNA; note = Description of Artificial Sequence: Synthetic oligonucleotide
cgttggctgtgaataccac

SEQ ID NO: 105 - RNA, 19 nt, synthetic construct
  source 1..19: mol_type = other RNA; note = Description of Artificial Sequence: Synthetic oligonucleotide
tggtattcacagccaacga

SEQ ID NO: 106 - RNA, 19 nt, synthetic construct
  source 1..19: mol_type = other RNA; note = Description of Artificial Sequence: Synthetic oligonucleotide
tcgttggctgtgaatacca

SEQ ID NO: 107 - RNA, 19 nt, synthetic construct
  source 1..19: mol_type = other RNA; note = Description of Artificial Sequence: Synthetic oligonucleotide
ggtattcacagccaacgac

SEQ ID NO: 108 - RNA, 19 nt, synthetic construct
  source 1..19: mol_type = other RNA; note = Description of Artificial Sequence: Synthetic oligonucleotide
gtcgttggctgtgaatacc

SEQ ID NO: 109 - RNA, 19 nt, synthetic construct
  source 1..19: mol_type = other RNA; note = Description of Artificial Sequence: Synthetic oligonucleotide
gtattcacagccaacgact

SEQ ID NO: 110 - RNA, 19 nt, synthetic construct
  source 1..19: mol_type = other RNA; note = Description of Artificial Sequence: Synthetic oligonucleotide
agtcgttggctgtgaatac

SEQ ID NO: 111 - RNA, 19 nt, synthetic construct
  source 1..19: mol_type = other RNA; note = Description of Artificial Sequence: Synthetic oligonucleotide
tattcacagccaacgactc

SEQ ID NO: 112 - RNA, 19 nt, synthetic construct
  source 1..19: mol_type = other RNA; note = Description of Artificial Sequence: Synthetic oligonucleotide
gagtcgttggctgtgaata

SEQ ID NO: 113 - RNA, 19 nt, synthetic construct
  source 1..19: mol_type = other RNA; note = Description of Artificial Sequence: Synthetic oligonucleotide
tcacagccaacgactccgg

SEQ ID NO: 114 - RNA, 19 nt, synthetic construct
  source 1..19: mol_type = other RNA; note = Description of Artificial Sequence: Synthetic oligonucleotide
ccggagtcgttggctgtga

SEQ ID NO: 115 - RNA, 19 nt, synthetic construct
  source 1..19: mol_type = other RNA; note = Description of Artificial Sequence: Synthetic oligonucleotide
ccccgccgctacaccattg

SEQ ID NO: 116 - RNA, 19 nt, synthetic construct
  source 1..19: mol_type = other RNA; note = Description of Artificial Sequence: Synthetic oligonucleotide
caatggtgtagcggcgggg

SEQ ID NO: 117 - RNA, 19 nt, synthetic construct
  source 1..19: mol_type = other RNA; note = Description of Artificial Sequence: Synthetic oligonucleotide
gaagtccactcattcttgg

SEQ ID NO: 118 - RNA, 19 nt, synthetic construct
  source 1..19: mol_type = other RNA; note = Description of Artificial Sequence: Synthetic oligonucleotide
ccaagaatgagtggacttc

SEQ ID NO: 119 - RNA, 19 nt, synthetic construct
  source 1..19: mol_type = other RNA; note = Description of Artificial Sequence: Synthetic oligonucleotide
ccctgctgagcccctactc

SEQ ID NO: 120 - RNA, 19 nt, synthetic construct
  source 1..19: mol_type = other RNA; note = Description of Artificial Sequence: Synthetic oligonucleotide
gagtaggggctcagcaggg

SEQ ID NO: 121 - RNA, 19 nt, synthetic construct
  source 1..19: mol_type = other RNA; note = Description of Artificial Sequence: Synthetic oligonucleotide
ctgagcccctactcctatt

SEQ ID NO: 122 - RNA, 19 nt, synthetic construct
  source 1..19: mol_type = other RNA; note = Description of Artificial Sequence: Synthetic oligonucleotide
aataggagtaggggctcag

SEQ ID NO: 123 - RNA, 19 nt, synthetic construct
  source 1..19: mol_type = other RNA; note = Description of Artificial Sequence: Synthetic oligonucleotide
tgagcccctactcctattc

SEQ ID NO: 124 - RNA, 19 nt, synthetic construct
  source 1..19: mol_type = other RNA; note = Description of Artificial Sequence: Synthetic oligonucleotide
gaataggagtaggggctca

SEQ ID NO: 125 - RNA, 19 nt, synthetic construct
  source 1..19: mol_type = other RNA; note = Description of Artificial Sequence: Synthetic oligonucleotide
cccctactcctattccacc

SEQ ID NO: 126 - RNA, 19 nt, synthetic construct
  source 1..19: mol_type = other RNA; note = Description of Artificial Sequence: Synthetic oligonucleotide
ggtggaataggagtagggg

SEQ ID NO: 127 - RNA, 19 nt, synthetic construct
  source 1..19: mol_type = other RNA; note = Description of Artificial Sequence: Synthetic oligonucleotide
ctactcctattccaccacg

SEQ ID NO: 128 - RNA, 19 nt, synthetic construct
  source 1..19: mol_type = other RNA; note = Description of Artificial Sequence: Synthetic oligonucleotide
cgtggtggaataggagtag

SEQ ID NO: 129 - RNA, 19 nt, synthetic construct
  source 1..19: mol_type = other RNA; note = Description of Artificial Sequence: Synthetic oligonucleotide
tactcctattccaccacgg

SEQ ID NO: 130 - RNA, 19 nt, synthetic construct
  source 1..19: mol_type = other RNA; note = Description of Artificial Sequence: Synthetic oligonucleotide
ccgtggtggaataggagta

SEQ ID NO: 131 - RNA, 19 nt, synthetic construct
  source 1..19: mol_type = other RNA; note = Description of Artificial Sequence: Synthetic oligonucleotide
actcctattccaccacggc

SEQ ID NO: 132 - RNA, 19 nt, synthetic construct
  source 1..19: mol_type = other RNA; note = Description of Artificial Sequence: Synthetic oligonucleotide
gccgtggtggaataggagt

SEQ ID NO: 133 - RNA, 19 nt, synthetic construct
  source 1..19: mol_type = other RNA; note = Description of Artificial Sequence: Synthetic oligonucleotide
tcctattccaccacggctg

SEQ ID NO: 134 - RNA, 19 nt, synthetic construct
  source 1..19: mol_type = other RNA; note = Description of Artificial Sequence: Synthetic oligonucleotide
cagccgtggtggaatagga

SEQ ID NO: 135 - RNA, 19 nt, synthetic construct
  source 1..19: mol_type = other RNA; note = Description of Artificial Sequence: Synthetic oligonucleotide
tattccaccacggctgtcg

SEQ ID NO: 136 - RNA, 19 nt, synthetic construct
  source 1..19: mol_type = other RNA; note = Description of Artificial Sequence: Synthetic oligonucleotide
cgacagccgtggtggaata

SEQ ID NO: 137 - RNA, 19 nt, synthetic construct
  source 1..19: mol_type = other RNA; note = Description of Artificial Sequence: Synthetic oligonucleotide
attccaccacggctgtcgt

SEQ ID NO: 138 - RNA, 19 nt, synthetic construct
  source 1..19: mol_type = other RNA; note = Description of Artificial Sequence: Synthetic oligonucleotide
acgacagccgtggtggaat

SEQ ID NO: 139 - RNA, 19 nt, synthetic construct
  source 1..19: mol_type = other RNA; note = Description of Artificial Sequence: Synthetic oligonucleotide
caccacggctgtcgtcacc

SEQ ID NO: 140 - RNA, 19 nt, synthetic construct
  source 1..19: mol_type = other RNA; note = Description of Artificial Sequence: Synthetic oligonucleotide
ggtgacgacagccgtggtg

SEQ ID NO: 141 - RNA, 19 nt, synthetic construct
  source 1..19: mol_type = other RNA; note = Description of Artificial Sequence: Synthetic oligonucleotide
accacggctgtcgtcacca

SEQ ID NO: 142 - RNA, 19 nt, synthetic construct
  source 1..19: mol_type = other RNA; note = Description of Artificial Sequence: Synthetic oligonucleotide
tggtgacgacagccgtggt

SEQ ID NO: 143 - RNA, 19 nt, synthetic construct
  source 1..19: mol_type = other RNA; note = Description of Artificial Sequence: Synthetic oligonucleotide
ccacggctgtcgtcaccaa

SEQ ID NO: 144 - RNA, 19 nt, synthetic construct
  source 1..19: mol_type = other RNA; note = Description of Artificial Sequence: Synthetic oligonucleotide
ttggtgacgacagccgtgg

SEQ ID NO: 145 - RNA, 19 nt, synthetic construct
  source 1..19: mol_type = other RNA; note = Description of Artificial Sequence: Synthetic oligonucleotide
acggctgtcgtcaccaatc

SEQ ID NO: 146 - RNA, 19 nt, synthetic construct
  source 1..19: mol_type = other RNA; note = Description of Artificial Sequence: Synthetic oligonucleotide
gattggtgacgacagccgt

SEQ ID NO: 147 - RNA, 19 nt, synthetic construct
  source 1..19: mol_type = other RNA; note = Description of Artificial Sequence: Synthetic oligonucleotide
cggctgtcgtcaccaatcc

SEQ ID NO: 148 - RNA, 19 nt, synthetic construct
  source 1..19: mol_type = other RNA; note = Description of Artificial Sequence: Synthetic oligonucleotide
ggattggtgacgacagccg

SEQ ID NO: 149 - RNA, 19 nt, synthetic construct
  source 1..19: mol_type = other RNA; note = Description of Artificial Sequence: Synthetic oligonucleotide
cgtcaccaatcccaaggaa

SEQ ID NO: 150 - RNA, 19 nt, synthetic construct
  source 1..19: mol_type = other RNA; note = Description of Artificial Sequence: Synthetic oligonucleotide
ttccttgggattggtgacg

SEQ ID NO: 151 - RNA, 19 nt, synthetic construct
  source 1..19: mol_type = other RNA; note = Description of Artificial Sequence: Synthetic oligonucleotide
caatcccaaggaatgaggg

SEQ ID NO: 152 - RNA, 19 nt, synthetic construct
  source 1..19: mol_type = other RNA; note = Description of Artificial Sequence: Synthetic oligonucleotide
ccctcattccttgggattg

SEQ ID NO: 153 - RNA, 19 nt, synthetic construct
  source 1..19: mol_type = other RNA; note = Description of Artificial Sequence: Synthetic oligonucleotide
cctgaaggacgagggatgg

SEQ ID NO: 154 - RNA, 19 nt, synthetic construct
  source 1..19: mol_type = other RNA; note = Description of Artificial Sequence: Synthetic oligonucleotide
ccatccctcgtccttcagg

SEQ ID NO: 155 - RNA, 19 nt, synthetic construct
  source 1..19: mol_type = other RNA; note = Description of Artificial Sequence: Synthetic oligonucleotide
ggacgagggatgggatttc

SEQ ID NO: 156 - RNA, 19 nt, synthetic construct
  source 1..19: mol_type = other RNA; note = Description of Artificial Sequence: Synthetic oligonucleotide
gaaatcccatccctcgtcc

SEQ ID NO: 157 - RNA, 19 nt, synthetic construct
  source 1..19: mol_type = other RNA; note = Description of Artificial Sequence: Synthetic oligonucleotide
aagtccactcattcttggc

SEQ ID NO: 158 - RNA, 19 nt, synthetic construct
  source 1..19: mol_type = other RNA; note = Description of Artificial Sequence: Synthetic oligonucleotide
gccaagaatgagtggactt

SEQ ID NO: 159 - RNA, 19 nt, synthetic construct
  source 1..19: mol_type = other RNA; note = Description of Artificial Sequence: Synthetic oligonucleotide
gggatttcatgtaaccaag

SEQ ID NO: 160 - RNA, 19 nt, synthetic construct
  source 1..19: mol_type = other RNA; note = Description of Artificial Sequence: Synthetic oligonucleotide
cttggttacatgaaatccc

SEQ ID NO: 161 - RNA, 19 nt, synthetic construct
  source 1..19: mol_type = other RNA; note = Description of Artificial Sequence: Synthetic oligonucleotide
ggatttcatgtaaccaaga

SEQ ID NO: 162 - RNA, 19 nt, synthetic construct
  source 1..19: mol_type = other RNA; note = Description of Artificial Sequence: Synthetic oligonucleotide
tcttggttacatgaaatcc

SEQ ID NO: 163 - RNA, 19 nt, synthetic construct
  source 1..19: mol_type = other RNA; note = Description of Artificial Sequence: Synthetic oligonucleotide
tcatgtaaccaagagtatt

SEQ ID NO: 164 - RNA, 19 nt, synthetic construct
  source 1..19: mol_type = other RNA; note = Description of Artificial Sequence: Synthetic oligonucleotide
aatactcttggttacatga

SEQ ID NO: 165 - RNA, 19 nt, synthetic construct
  source 1..19: mol_type = other RNA; note = Description of Artificial Sequence: Synthetic oligonucleotide
atgtaaccaagagtattcc

SEQ ID NO: 166 - RNA, 19 nt, synthetic construct
  source 1..19: mol_type = other RNA; note = Description of Artificial Sequence: Synthetic oligonucleotide
ggaatactcttggttacat

SEQ ID NO: 167 - RNA, 19 nt, synthetic construct
  source 1..19: mol_type = other RNA; note = Description of Artificial Sequence: Synthetic oligonucleotide
tgtaaccaagagtattcca

SEQ ID NO: 168 - RNA, 19 nt, synthetic construct
  source 1..19: mol_type = other RNA; note = Description of Artificial Sequence: Synthetic oligonucleotide
tggaatactcttggttaca

SEQ ID NO: 169 - RNA, 19 nt, synthetic construct
  source 1..19: mol_type = other RNA; note = Description of Artificial Sequence: Synthetic oligonucleotide
gtaaccaagagtattccat

SEQ ID NO: 170 - RNA, 19 nt, synthetic construct
  source 1..19: mol_type = other RNA; note = Description of Artificial Sequence: Synthetic oligonucleotide
atggaatactcttggttac

SEQ ID NO: 171 - RNA, 19 nt, synthetic construct
  source 1..19: mol_type = other RNA; note = Description of Artificial Sequence: Synthetic oligonucleotide
tgccttgctggactggtat

SEQ ID NO: 172 - RNA, 19 nt, synthetic construct
  source 1..19: mol_type = other RNA; note = Description of Artificial Sequence: Synthetic oligonucleotide
ataccagtccagcaaggca

SEQ ID NO: 173 - RNA, 19 nt, synthetic construct
  source 1..19: mol_type = other RNA; note = Description of Artificial Sequence: Synthetic oligonucleotide
taaagcagtgttttcacct

SEQ ID NO: 174 - RNA, 19 nt, synthetic construct
  source 1..19: mol_type = other RNA; note = Description of Artificial Sequence: Synthetic oligonucleotide
aggtgaaaacactgcttta

SEQ ID NO: 175 - RNA, 19 nt, synthetic construct
  source 1..19: mol_type = other RNA; note = Description of Artificial Sequence: Synthetic oligonucleotide
gccttgctggactggtatt

SEQ ID NO: 176 - RNA, 19 nt, synthetic construct
  source 1..19: mol_type = other RNA; note = Description of Artificial Sequence: Synthetic oligonucleotide
aataccagtccagcaaggc

SEQ ID NO: 177 - RNA, 19 nt, synthetic construct
  source 1..19: mol_type = other RNA; note = Description of Artificial Sequence: Synthetic oligonucleotide
tgttttcacctcatatgct

SEQ ID NO: 178 - RNA, 19 nt, synthetic construct
  source 1..19: mol_type = other RNA; note = Description of Artificial Sequence: Synthetic oligonucleotide
agcatatgaggtgaaaaca

SEQ ID NO: 179 - RNA, 19 nt, synthetic construct
  source 1..19: mol_type = other RNA; note = Description of Artificial Sequence: Synthetic oligonucleotide
gttttcacctcatatgcta

SEQ ID NO: 180 - RNA, 19 nt, synthetic construct
  source 1..19: mol_type = other RNA; note = Description of Artificial Sequence: Synthetic oligonucleotide
tagcatatgaggtgaaaac

SEQ ID NO: 181 - RNA, 19 nt, synthetic construct
  source 1..19: mol_type = other RNA; note = Description of Artificial Sequence: Synthetic oligonucleotide
ttttcacctcatatgctat

SEQ ID NO: 182 - RNA, 19 nt, synthetic construct
  source 1..19: mol_type = other RNA; note = Description of Artificial Sequence: Synthetic oligonucleotide
atagcatatgaggtgaaaa

SEQ ID NO: 183 - RNA, 19 nt, synthetic construct
  source 1..19: mol_type = other RNA; note = Description of Artificial Sequence: Synthetic oligonucleotide
ttcacctcatatgctatgt

SEQ ID NO: 184 - RNA, 19 nt, synthetic construct
  source 1..19: mol_type = other RNA; note = Description of Artificial Sequence: Synthetic oligonucleotide
acatagcatatgaggtgaa

SEQ ID NO: 185 - RNA, 19 nt, synthetic construct
  source 1..19: mol_type = other RNA; note = Description of Artificial Sequence: Synthetic oligonucleotide
cacctcatatgctatgtta

SEQ ID NO: 186 - RNA, 19 nt, synthetic construct
  source 1..19: mol_type = other RNA; note = Description of Artificial Sequence: Synthetic oligonucleotide
taacatagcatatgaggtg

SEQ ID NO: 187 - RNA, 19 nt, synthetic construct
  source 1..19: mol_type = other RNA; note = Description of Artificial Sequence: Synthetic oligonucleotide
ccttgctggactggtattt

SEQ ID NO: 188 - RNA, 19 nt, synthetic construct
  source 1..19: mol_type = other RNA; note = Description of Artificial Sequence: Synthetic oligonucleotide
aaataccagtccagcaagg

SEQ ID NO: 189 - RNA, 19 nt, synthetic construct
  source 1..19: mol_type = other RNA; note = Description of Artificial Sequence: Synthetic oligonucleotide
atatgctatgttagaagtc

SEQ ID NO: 190 - RNA, 19 nt, synthetic construct
  source 1..19: mol_type = other RNA; note = Description of Artificial Sequence: Synthetic oligonucleotide
gacttctaacatagcatat

SEQ ID NO: 191 - RNA, 19 nt, synthetic construct
  source 1..19: mol_type = other RNA; note = Description of Artificial Sequence: Synthetic oligonucleotide
tatgctatgttagaagtcc

SEQ ID NO: 192 - RNA, 19 nt, synthetic construct
  source 1..19: mol_type = other RNA; note = Description of Artificial Sequence: Synthetic oligonucleotide
ggacttctaacatagcata

SEQ ID NO: 193 - RNA, 19 nt, synthetic construct
  source 1..19: mol_type = other RNA; note = Description of Artificial Sequence: Synthetic oligonucleotide
tgctatgttagaagtccag

SEQ ID NO: 194 - RNA, 19 nt, synthetic construct
  source 1..19: mol_type = other RNA; note = Description of Artificial Sequence: Synthetic oligonucleotide
ctggacttctaacatagca

SEQ ID NO: 195 - RNA, 19 nt, synthetic construct
  source 1..19: mol_type = other RNA; note = Description of Artificial Sequence: Synthetic oligonucleotide
cttgctggactggtatttg

SEQ ID NO: 196 - RNA, 19 nt, synthetic construct
  source 1..19: mol_type = other RNA; note = Description of Artificial Sequence: Synthetic oligonucleotide
caaataccagtccagcaag

SEQ ID NO: 197 - RNA, 19 nt, synthetic construct
  source 1..19: mol_type = other RNA; note = Description of Artificial Sequence: Synthetic oligonucleotide
agtccaggcagagacaata

SEQ ID NO: 198 - DNA, 20 bp, synthetic construct
  source 1..20: mol_type = other DNA; note = Description of Artificial Sequence: Synthetic oligonucleotide; note = Description of Combined DNA/RNA Molecule: Synthetic oligonucleotide
  misc_feature 1..18: note = RNA
  misc_feature 19..20: note = DNA
attgtctctgcctggacttt

SEQ ID NO: 199 - RNA, 19 nt, synthetic construct
  source 1..19: mol_type = other RNA; note = Description of Artificial Sequence: Synthetic oligonucleotide
tccaggcagagacaataaa

SEQ ID NO: 200 - RNA, 19 nt, synthetic construct
  source 1..19: mol_type = other RNA; note = Description of Artificial Sequence: Synthetic oligonucleotide
tttattgtctctgcctgga

SEQ ID NO: 201 - RNA, 19 nt, synthetic construct
  source 1..19: mol_type = other RNA; note = Description of Artificial Sequence: Synthetic oligonucleotide
gtgaaaggcacttttcatt

SEQ ID NO: 202 - RNA, 19 nt, synthetic construct
  source 1..19: mol_type = other RNA; note = Description of Artificial Sequence: Synthetic oligonucleotide
aatgaaaagtgcctttcac

SEQ ID NO: 203 - RNA, 19 nt, synthetic construct
  source 1..19: mol_type = other RNA; note = Description of Artificial Sequence: Synthetic oligonucleotide
tggactggtatttgtgtct

SEQ ID NO: 204 - RNA, 19 nt, synthetic construct
  source 1..19: mol_type = other RNA; note = Description of Artificial Sequence: Synthetic oligonucleotide
agacacaaataccagtcca

SEQ ID NO: 205 - RNA, 19 nt, synthetic construct
  source 1..19: mol_type = other RNA; note = Description of Artificial Sequence: Synthetic oligonucleotide
gtctgaggctggccctacg

SEQ ID NO: 206 - RNA, 19 nt, synthetic construct
  source 1..19: mol_type = other RNA; note = Description of Artificial Sequence: Synthetic oligonucleotide
cgtagggccagcctcagac

SEQ ID NO: 207 - RNA, 19 nt, synthetic construct
  source 1..19: mol_type = other RNA; note = Description of Artificial Sequence: Synthetic oligonucleotide
ctgaggctggccctacggg

SEQ ID NO: 208 - RNA, 19 nt, synthetic construct
  source 1..19: mol_type = other RNA; note = Description of Artificial Sequence: Synthetic oligonucleotide
cccgtagggccagcctcag

SEQ ID NO: 209 - RNA, 19 nt, synthetic construct
  source 1..19: mol_type = other RNA; note = Description of Artificial Sequence: Synthetic oligonucleotide
gaggctggccctacgggca

SEQ ID NO: 210 - RNA, 19 nt, synthetic construct
  source 1..19: mol_type = other RNA; note = Description of Artificial Sequence: Synthetic oligonucleotide
tgcccgtagggccagcctc

SEQ ID NO: 211 - RNA, 19 nt, synthetic construct
  source 1..19: mol_type = other RNA; note = Description of Artificial Sequence: Synthetic oligonucleotide
aggctggccctacgggcac

SEQ ID NO: 212 - RNA, 19 nt, synthetic construct
  source 1..19: mol_type = other RNA; note = Description of Artificial Sequence: Synthetic oligonucleotide
gtgcccgtagggccagcct

SEQ ID NO: 213 - RNA, 19 nt, synthetic construct
  source 1..19: mol_type = other RNA; note = Description of Artificial Sequence: Synthetic oligonucleotide
gctggccctacgggcaccg

SEQ ID NO: 214 - RNA, 19 nt, synthetic construct
  source 1..19: mol_type = other RNA; note = Description of Artificial Sequence: Synthetic oligonucleotide
cggtgcccgtagggccagc

SEQ ID NO: 215 - RNA, 19 nt, synthetic construct
  source 1..19: mol_type = other RNA; note = Description of Artificial Sequence: Synthetic oligonucleotide
ctggccctacgggcaccgg

SEQ ID NO: 216 - RNA, 19 nt, synthetic construct
  source 1..19: mol_type = other RNA; note = Description of Artificial Sequence: Synthetic oligonucleotide
ccggtgcccgtagggccag

SEQ ID NO: 217 - RNA, 19 nt, synthetic construct
  source 1..19: mol_type = other RNA; note = Description of Artificial Sequence: Synthetic oligonucleotide
ggccctacgggcaccggtg

SEQ ID NO: 218 - RNA, 19 nt, synthetic construct
  source 1..19: mol_type = other RNA; note = Description of Artificial Sequence: Synthetic oligonucleotide
caccggtgcccgtagggcc

SEQ ID NO: 219 - RNA, 19 nt, synthetic construct
  source 1..19: mol_type = other RNA; note = Description of Artificial Sequence: Synthetic oligonucleotide
ccactcattcttggcagga

SEQ ID NO: 220 - RNA, 19 nt, synthetic construct
  source 1..19: mol_type = other RNA; note = Description of Artificial Sequence: Synthetic oligonucleotide
tcctgccaagaatgagtgg

SEQ ID NO: 221 - RNA, 19 nt, synthetic construct
  source 1..19: mol_type = other RNA; note = Description of Artificial Sequence: Synthetic oligonucleotide
cctacgggcaccggtgaat

SEQ ID NO: 222 - RNA, 19 nt, synthetic construct
  source 1..19: mol_type = other RNA; note = Description of Artificial Sequence: Synthetic oligonucleotide
attcaccggtgcccgtagg

SEQ ID NO: 223 - RNA, 19 nt, synthetic construct
  source 1..19: mol_type = other RNA; note = Description of Artificial Sequence: Synthetic oligonucleotide
ctacgggcaccggtgaatc

SEQ ID NO: 224 - RNA, 19 nt, synthetic construct
  source 1..19: mol_type = other RNA; note = Description of Artificial Sequence: Synthetic oligonucleotide
gattcaccggtgcccgtag

SEQ ID NO: 225 - RNA, 19 nt, synthetic construct
  source 1..19: mol_type = other RNA; note = Description of Artificial Sequence: Synthetic oligonucleotide
tacgggcaccggtgaatcc

SEQ ID NO: 226 - RNA, 19 nt, synthetic construct
  source 1..19: mol_type = other RNA; note = Description of Artificial Sequence: Synthetic oligonucleotide
ggattcaccggtgcccgta

SEQ ID NO: 227 - RNA, 19 nt, synthetic construct
  source 1..19: mol_type = other RNA; note = Description of Artificial Sequence: Synthetic oligonucleotide
acgggcaccggtgaatcca

SEQ ID NO: 228 - RNA, 19 nt, synthetic construct
  source 1..19: mol_type = other RNA; note = Description of Artificial Sequence: Synthetic oligonucleotide
tggattcaccggtgcccgt

SEQ ID NO: 229 - RNA, 19 nt, synthetic construct
  source 1..19: mol_type = other RNA; note = Description of Artificial Sequence: Synthetic oligonucleotide
gcaccggtgaatccaagtg

SEQ ID NO: 230 - RNA, 19 nt, synthetic construct
  source 1..19: mol_type = other RNA; note = Description of Artificial Sequence: Synthetic oligonucleotide
cacttggattcaccggtgc

SEQ ID NO: 231 - RNA, 19 nt, synthetic construct
  source 1..19: mol_type = other RNA; note = Description of Artificial Sequence: Synthetic oligonucleotide
caccggtgaatccaagtgt

SEQ ID NO: 232 - RNA, 19 nt, synthetic construct
  source 1..19: mol_type = other RNA; note = Description of Artificial Sequence: Synthetic oligonucleotide
acacttggattcaccggtg

SEQ ID NO: 233 - RNA, 19 nt, synthetic construct
  source 1..19: mol_type = other RNA; note = Description of Artificial Sequence: Synthetic oligonucleotide
tgtggccatgcatgtgttc

SEQ ID NO: 234 - RNA, 19 nt, synthetic construct
  source 1..19: mol_type = other RNA; note = Description of Artificial Sequence: Synthetic oligonucleotide
gaacacatgcatggccaca

SEQ ID NO: 235 - RNA, 19 nt, synthetic construct
  source 1..19: mol_type = other RNA; note = Description of Artificial Sequence: Synthetic oligonucleotide
gtggccatgcatgtgttca

SEQ ID NO: 236 - RNA, 19 nt, synthetic construct
  source 1..19: mol_type = other RNA; note = Description of Artificial Sequence: Synthetic oligonucleotide
tgaacacatgcatggccac

SEQ ID NO: 237 - RNA, 19 nt, synthetic construct
  source 1..19: mol_type = other RNA; note = Description of Artificial Sequence: Synthetic oligonucleotide
gccatgcatgtgttcagaa

SEQ ID NO: 238 - RNA, 19 nt, synthetic construct
  source 1..19: mol_type = other RNA; note = Description of Artificial Sequence: Synthetic oligonucleotide
ttctgaacacatgcatggc

SEQ ID NO: 239 - RNA, 19 nt, synthetic construct
  source 1..19: mol_type = other RNA; note = Description of Artificial Sequence: Synthetic oligonucleotide
tattccaccacggctgtca

SEQ ID NO: 240 - RNA, 19 nt, synthetic construct
  source 1..19: mol_type = other RNA; note = Description of Artificial Sequence: Synthetic oligonucleotide
tgacagccgtggtggaata

SEQ ID NO: 241 - RNA, 19 nt, synthetic construct
  source 1..19: mol_type = other RNA; note = Description of Artificial Sequence: Synthetic oligonucleotide
gtcatcaccaatcccaagg

SEQ ID NO: 242 - RNA, 19 nt, synthetic construct
  source 1..19: mol_type = other RNA; note = Description of Artificial Sequence: Synthetic oligonucleotide
ccttgggattggtgatgac

SEQ ID NO: 243 - RNA, 19 nt, synthetic construct
  source 1..19: mol_type = other RNA; note = Description of Artificial Sequence: Synthetic oligonucleotide
gtcctctgatggtcaaagt

SEQ ID NO: 244 - RNA, 19 nt, synthetic construct
  source 1..19: mol_type = other RNA; note = Description of Artificial Sequence: Synthetic oligonucleotide
actttgaccatcagaggac

SEQ ID NO: 245 - RNA, 19 nt, synthetic construct
  source 1..19: mol_type = other RNA; note = Description of Artificial Sequence: Synthetic oligonucleotide
gatggtcaaagttctagat

SEQ ID NO: 246 - RNA, 19 nt, synthetic construct
  source 1..19: mol_type = other RNA; note = Description of Artificial Sequence: Synthetic oligonucleotide
atctagaactttgaccatc

SEQ ID NO: 247 - RNA, 19 nt, synthetic construct
  source 1..19: mol_type = other RNA; note = Description of Artificial Sequence: Synthetic oligonucleotide
atgctgtccgaggcagtcc

SEQ ID NO: 248 - RNA, 19 nt, synthetic construct
  source 1..19: mol_type = other RNA; note = Description of Artificial Sequence: Synthetic oligonucleotide
ggactgcctcggacagcat

SEQ ID NO: 249 - RNA, 19 nt, synthetic construct
  source 1..19: mol_type = other RNA; note = Description of Artificial Sequence: Synthetic oligonucleotide
ccgtgcatgtgttcagaaa

SEQ ID NO: 250 - RNA, 19 nt, synthetic construct
  source 1..19: mol_type = other RNA; note = Description of Artificial Sequence: Synthetic oligonucleotide
tttctgaacacatgcacgg

SEQ ID NO: 251 - RNA, 19 nt, synthetic construct
  source 1..19: mol_type = other RNA; note = Description of Artificial Sequence: Synthetic oligonucleotide
agtctggagagctgcatgg

SEQ ID NO: 252 - RNA, 19 nt, synthetic construct
  source 1..19: mol_type = other RNA; note = Description of Artificial Sequence: Synthetic oligonucleotide
ccatgcagctctccagact

SEQ ID NO: 253 - RNA, 19 nt, synthetic construct
  source 1..19: mol_type = other RNA; note = Description of Artificial Sequence: Synthetic oligonucleotide
catgggctcacaactgagg

SEQ ID NO: 254 - RNA, 19 nt, synthetic construct
  source 1..19: mol_type = other RNA; note = Description of Artificial Sequence: Synthetic oligonucleotide
cctcagttgtgagcccatg

SEQ ID NO: 255 - RNA, 19 nt, synthetic construct
  source 1..19: mol_type = other RNA; note = Description of Artificial Sequence: Synthetic oligonucleotide
tctcatcgtctgctcctcc

SEQ ID NO: 256 - RNA, 19 nt, synthetic construct
  source 1..19: mol_type = other RNA; note = Description of Artificial Sequence: Synthetic oligonucleotide
ggaggagcagacgatgaga

SEQ ID NO: 257 - RNA, 19 nt, synthetic construct
  source 1..19: mol_type = other RNA; note = Description of Artificial Sequence: Synthetic oligonucleotide
ccccattccatgagcatgc

SEQ ID NO: 258 - RNA, 19 nt, synthetic construct
  source 1..19: mol_type = other RNA; note = Description of Artificial Sequence: Synthetic oligonucleotide
gcatgctcatggaatgggg

SEQ ID NO: 259 - RNA, 19 nt, synthetic construct
  source 1..19: mol_type = other RNA; note = Description of Artificial Sequence: Synthetic oligonucleotide
gcccctactcctattccac

SEQ ID NO: 260 - RNA, 19 nt, synthetic construct
  source 1..19: mol_type = other RNA; note = Description of Artificial Sequence: Synthetic oligonucleotide
gtggaataggagtaggggc

SEQ ID NO: 261 - RNA, 19 nt, synthetic construct
  source 1..19: mol_type = other RNA; note = Description of Artificial Sequence: Synthetic oligonucleotide
ctattccaccacggctgtc

SEQ ID NO: 262 - RNA, 19 nt, synthetic construct
  source 1..19: mol_type = other RNA; note = Description of Artificial Sequence: Synthetic oligonucleotide
gacagccgtggtggaatag

SEQ ID NO: 263 - RNA, 19 nt, synthetic construct
  source 1..19: mol_type = other RNA; note = Description of Artificial Sequence: Synthetic oligonucleotide
cacggctgtcgtcaccaat

SEQ ID NO: 264 - RNA, 19 nt, synthetic construct
  source 1..19: mol_type = other RNA; note = Description of Artificial Sequence: Synthetic oligonucleotide
attggtgacgacagccgtg

SEQ ID NO: 265 - RNA, 19 nt, synthetic construct
  source 1..19: mol_type = other RNA; note = Description of Artificial Sequence: Synthetic oligonucleotide
aggacgagggatgggattt

SEQ ID NO: 266 - RNA, 19 nt, synthetic construct
  source 1..19: mol_type = other RNA; note = Description of Artificial Sequence: Synthetic oligonucleotide
aaatcccatccctcgtcct

SEQ ID NO: 267 - RNA, 19 nt, synthetic construct
  source 1..19: mol_type = other RNA; note = Description of Artificial Sequence: Synthetic oligonucleotide
tcacctcatatgctatgtt

SEQ ID NO: 268 - RNA, 19 nt, synthetic construct
  source 1..19: mol_type = other RNA; note = Description of Artificial Sequence: Synthetic oligonucleotide
aacatagcatatgaggtga

SEQ ID NO: 269 - RNA, 19 nt, synthetic construct
  source 1..19: mol_type = other RNA; note = Description of Artificial Sequence: Synthetic oligonucleotide
cctcatatgctatgttaga

SEQ ID NO: 270 - RNA, 19 nt, synthetic construct
  source 1..19: mol_type = other RNA; note = Description of Artificial Sequence: Synthetic oligonucleotide
tctaacatagcatatgagg

SEQ ID NO: 271 - RNA, 19 nt, synthetic construct
  source 1..19: mol_type = other RNA; note = Description of Artificial Sequence: Synthetic oligonucleotide
atgttagaagtccaggcag

SEQ ID NO: 272 - RNA, 19 nt, synthetic construct
  source 1..19: mol_type = other RNA; note = Description of Artificial Sequence: Synthetic oligonucleotide
ctgcctggacttctaacat

SEQ ID NO: 273 - RNA, 19 nt, synthetic construct
  source 1..19: mol_type = other RNA; note = Description of Artificial Sequence: Synthetic oligonucleotide
tctgaggctggccctacgg

SEQ ID NO: 274 - RNA, 19 nt, synthetic construct
  source 1..19: mol_type = other RNA; note = Description of Artificial Sequence: Synthetic oligonucleotide
ccgtagggccagcctcaga

SEQ ID NO: 275 - RNA, 19 nt, synthetic construct
  source 1..19: mol_type = other RNA; note = Description of Artificial Sequence: Synthetic oligonucleotide
ggccctacgggcaccggtg

SEQ ID NO: 276 - RNA, 19 nt, synthetic construct
  source 1..19: mol_type = other RNA; note = Description of Artificial Sequence: Synthetic oligonucleotide
caccggtgcccgtagggcc

SEQ ID NO: 277 - RNA, 19 nt, synthetic construct
  source 1..19: mol_type = other RNA; note = Description of Artificial Sequence: Synthetic oligonucleotide
gggcaccggtgaatccaag

SEQ ID NO: 278 - RNA, 19 nt, synthetic construct
  source 1..19: mol_type = other RNA; note = Description of Artificial Sequence: Synthetic oligonucleotide
cttggattcaccggtgccc

SEQ ID NO: 279 - RNA, 19 nt, synthetic construct
  source 1..19: mol_type = other RNA; note = Description of Artificial Sequence: Synthetic oligonucleotide
ccatgcatgtgttcagaaa

SEQ ID NO: 280 - RNA, 19 nt, synthetic construct
  source 1..19: mol_type = other RNA; note = Description of Artificial Sequence: Synthetic oligonucleotide
tttctgaacacatgcatgg

SEQ ID NO: 281 - RNA, 21 nt, synthetic construct
  source 1..21: mol_type = other RNA; note = Description of Artificial Sequence: Synthetic oligonucleotide; note = Description of Combined DNA/RNA Molecule: Synthetic oligonucleotide
  misc_difference 20: note = modified_base - a, c, t, g, unknown or other, u or 2'-deoxythymidine-3'-phosphate
  misc_difference 21: note = modified_base - a, c, t, g, unknown or other, u or 2'-deoxythymidine-3'-phosphate
ccggtgaatccaagtgtccnn

SEQ ID NO: 282 - RNA, 21 nt, synthetic construct
  source 1..21: mol_type = other RNA; note = Description of Artificial Sequence: Synthetic oligonucleotide; note = Description of Combined DNA/RNA Molecule: Synthetic oligonucleotide
  misc_difference 20: note = modified_base - a, c, t, g, unknown or other, u or 2'-deoxythymidine-3'-phosphate
  misc_difference 21: note = modified_base - a, c, t, g, unknown or other, u or 2'-deoxythymidine-3'-phosphate
ggacacttggattcaccggnn

SEQ ID NO: 283 - RNA, 21 nt, synthetic construct
  source 1..21: mol_type = other RNA; note = Description of Artificial Sequence: Synthetic oligonucleotide; note = Description of Combined DNA/RNA Molecule: Synthetic oligonucleotide
  misc_difference 20: note = modified_base - a, c, t, g, unknown or other, u or 2'-deoxythymidine-3'-phosphate
  misc_difference 21: note = modified_base - a, c, t, g, unknown or other, u or 2'-deoxythymidine-3'-phosphate
actcattcttggcaggatgnn

SEQ ID NO: 284 - RNA, 21 nt, synthetic construct
  source 1..21: mol_type = other RNA; note = Description of Artificial Sequence: Synthetic oligonucleotide; note = Description of Combined DNA/RNA Molecule: Synthetic oligonucleotide
  misc_difference 20: note = modified_base - a, c, t, g, unknown or other, u or 2'-deoxythymidine-3'-phosphate
  misc_difference 21: note = modified_base - a, c, t, g, unknown or other, u or 2'-deoxythymidine-3'-phosphate
catcctgccaagaatgagtnn

SEQ ID NO: 285 - RNA, 21 nt, synthetic construct
  source 1..21: mol_type = other RNA; note = Description of Artificial Sequence: Synthetic oligonucleotide; note = Description of Combined DNA/RNA Molecule: Synthetic oligonucleotide
  misc_difference 20: note = modified_base - a, c, t, g, unknown or other, u or 2'-deoxythymidine-3'-phosphate
  misc_difference 21: note = modified_base - a, c, t, g, unknown or other, u or 2'-deoxythymidine-3'-phosphate
aagtgtcctctgatggtcann

SEQ ID NO: 286 - RNA, 21 nt, synthetic construct
  source 1..21: mol_type = other RNA; note = Description of Artificial Sequence: Synthetic oligonucleotide; note = Description of Combined DNA/RNA Molecule: Synthetic oligonucleotide
  misc_difference 20: note = modified_base - a, c, t, g, unknown or other, u or 2'-deoxythymidine-3'-phosphate
  misc_difference 21: note = modified_base - a, c, t, g, unknown or other, u or 2'-deoxythymidine-3'-phosphate
tgaccatcagaggacacttnn

SEQ ID NO: 287 - RNA, 21 nt, synthetic construct
  source 1..21: mol_type = other RNA; note = Description of Artificial Sequence: Synthetic oligonucleotide; note = Description of Combined DNA/RNA Molecule: Synthetic oligonucleotide
  misc_difference 20: note = modified_base - a, c, t, g, unknown or other, u or 2'-deoxythymidine-3'-phosphate
  misc_difference 21: note = modified_base - a, c, t, g, unknown or other, u or 2'-deoxythymidine-3'-phosphate
tcattcttggcaggatggcnn

SEQ ID NO: 288 - RNA, 21 nt, synthetic construct
  source 1..21: mol_type = other RNA; note = Description of Artificial Sequence: Synthetic oligonucleotide; note = Description of Combined DNA/RNA Molecule: Synthetic oligonucleotide
  misc_difference 20: note = modified_base - a, c, t, g, unknown or other, u or 2'-deoxythymidine-3'-phosphate
  misc_difference 21: note = modified_base - a, c, t, g, unknown or other, u or 2'-deoxythymidine-3'-phosphate
gccatcctgccaagaatgann

SEQ ID NO: 289 - RNA, 21 nt, synthetic construct
  source 1..21: mol_type = other RNA; note = Description of Artificial Sequence: Synthetic oligonucleotide; note = Description of Combined DNA/RNA Molecule: Synthetic oligonucleotide
  misc_difference 20: note = modified_base - a, c, t, g, unknown or other, u or 2'-deoxythymidine-3'-phosphate
  misc_difference 21: note = modified_base - a, c, t, g, unknown or other, u or 2'-deoxythymidine-3'-phosphate
aagttctagatgctgtccgnn

SEQ ID NO: 290 - RNA, 21 nt, synthetic construct
  source 1..21: mol_type = other RNA; note = Description of Artificial Sequence: Synthetic oligonucleotide; note = Description of Combined DNA/RNA Molecule: Synthetic oligonucleotide
  misc_difference 20: note = modified_base - a, c, t, g, unknown or other, u or 2'-deoxythymidine-3'-phosphate
  misc_difference 21: note = modified_base - a, c, t, g, unknown or other, u or 2'-deoxythymidine-3'-phosphate
cggacagcatctagaacttnn

SEQ ID NO: 291 - RNA, 21 nt, synthetic construct
  source 1..21: mol_type = other RNA; note = Description of Artificial Sequence: Synthetic oligonucleotide; note = Description of Combined DNA/RNA Molecule: Synthetic oligonucleotide
  misc_difference 20: note = modified_base - a, c, t, g, unknown or other, u or 2'-deoxythymidine-3'-phosphate
  misc_difference 21: note = modified_base - a, c, t, g, unknown or other, u or 2'-deoxythymidine-3'-phosphate
gttctagatgctgtccgagnn

SEQ ID NO: 292 - RNA, 21 nt, synthetic construct
  source 1..21: mol_type = other RNA; note = Description of Artificial Sequence: Synthetic oligonucleotide; note = Description of Combined DNA/RNA Molecule: Synthetic oligonucleotide
  misc_difference 20: note = modified_base - a, c, t, g, unknown or other, u or 2'-deoxythymidine-3'-phosphate
  misc_difference 21: note = modified_base - a, c, t, g, unknown or other, u or 2'-deoxythymidine-3'-phosphate
ctcggacagcatctagaacnn

SEQ ID NO: 293 - RNA, 21 nt, synthetic construct
  source 1..21: mol_type = other RNA; note = Description of Artificial Sequence: Synthetic oligonucleotide; note = Description of Combined DNA/RNA Molecule: Synthetic oligonucleotide
  misc_difference 20: note = modified_base - a, c, t, g, unknown or other, u or 2'-deoxythymidine-3'-phosphate
  misc_difference 21: note = modified_base - a, c, t, g, unknown or other, u or 2'-deoxythymidine-3'-phosphate
ctagatgctgtccgaggcann

SEQ ID NO: 294 - RNA, 21 nt, synthetic construct
  source 1..21: mol_type = other RNA; note = Description of Artificial Sequence: Synthetic oligonucleotide; note = Description of Combined DNA/RNA Molecule: Synthetic oligonucleotide
  misc_difference 20: note = modified_base - a, c, t, g, unknown or other, u or 2'-deoxythymidine-3'-phosphate
  misc_difference 21: note = modified_base - a, c, t, g, unknown or other, u or 2'-deoxythymidine-3'-phosphate
tgcctcggacagcatctagnn

SEQ ID NO: 295 - RNA, 21 nt, synthetic construct
  source 1..21: mol_type = other RNA; note = Description of Artificial Sequence: Synthetic oligonucleotide; note = Description of Combined DNA/RNA Molecule: Synthetic oligonucleotide
  misc_difference 20: note = modified_base - a, c, t, g, unknown or other, u or 2'-deoxythymidine-3'-phosphate
  misc_difference 21: note = modified_base - a, c, t, g, unknown or other, u or 2'-deoxythymidine-3'-phosphate
gatgctgtccgaggcagtcnn

SEQ ID NO: 296 - RNA, 21 nt, synthetic construct
  source 1..21: mol_type = other RNA; note = Description of Artificial Sequence: Synthetic oligonucleotide; note = Description of Combined DNA/RNA Molecule: Synthetic oligonucleotide
  misc_difference 20: note = modified_base - a, c, t, g, unknown or other, u or 2'-deoxythymidine-3'-phosphate
  misc_difference 21: note = modified_base - a, c, t, g, unknown or other, u or 2'-deoxythymidine-3'-phosphate
gactgcctcggacagcatcnn

SEQ ID NO: 297 - RNA, 21 nt, synthetic construct
  source 1..21: mol_type = other RNA; note = Description of Artificial Sequence: Synthetic oligonucleotide; note = Description of Combined DNA/RNA Molecule: Synthetic oligonucleotide
  misc_difference 20: note = modified_base - a, c, t, g, unknown or other, u or 2'-deoxythymidine-3'-phosphate
  misc_difference 21: note = modified_base - a, c, t, g, unknown or other, u or 2'-deoxythymidine-3'-phosphate
cattcttggcaggatggctnn

SEQ ID NO: 298 - RNA, 21 nt, synthetic construct
  source 1..21: mol_type = other RNA; note = Description of Artificial Sequence: Synthetic oligonucleotide; note = Description of Combined DNA/RNA Molecule: Synthetic oligonucleotide
  misc_difference 20: note = modified_base - a, c, t, g, unknown or other, u or 2'-deoxythymidine-3'-phosphate
  misc_difference 21: note = modified_base - a, c, t, g, unknown or other, u or 2'-deoxythymidine-3'-phosphate
agccatcctgccaagaatgnn

SEQ ID NO: 299 - RNA, 21 nt, synthetic construct
  source 1..21: mol_type = other RNA; note = Description of Artificial Sequence: Synthetic oligonucleotide; note = Description of Combined DNA/RNA Molecule: Synthetic oligonucleotide
  misc_difference 20: note = modified_base - a, c, t, g, unknown or other, u or 2'-deoxythymidine-3'-phosphate
  misc_difference 21: note = modified_base - a, c, t, g, unknown or other, u or 2'-deoxythymidine-3'-phosphate
tgctgtccgaggcagtcctnn

SEQ ID NO: 300 - RNA, 21 nt, synthetic construct
  source 1..21: mol_type = other RNA; note = Description of Artificial Sequence: Synthetic oligonucleotide; note = Description of Combined DNA/RNA Molecule: Synthetic oligonucleotide
  misc_difference 20: note = modified_base - a, c, t, g, unknown or other, u or 2'-deoxythymidine-3'-phosphate
  misc_difference 21: note = modified_base - a, c, t, g, unknown or other, u or 2'-deoxythymidine-3'-phosphate
aggactgcctcggacagcann

SEQ ID NO: 301 - RNA, 21 nt, synthetic construct
  source 1..21: mol_type = other RNA; note = Description of Artificial Sequence: Synthetic oligonucleotide; note = Description of Combined DNA/RNA Molecule: Synthetic oligonucleotide
  misc_difference 20: note = modified_base - a, c, t, g, unknown or other, u or 2'-deoxythymidine-3'-phosphate
  misc_difference 21: note = modified_base - a, c, t, g, unknown or other, u or 2'-deoxythymidine-3'-phosphate
ccgaggcagtcctgccatcnn

SEQ ID NO: 302 - RNA, 21 nt, synthetic construct
  source 1..21: mol_type = other RNA; note = Description of Artificial Sequence: Synthetic oligonucleotide; note = Description of Combined DNA/RNA Molecule: Synthetic oligonucleotide
  misc_difference 20: note = modified_base - a, c, t, g, unknown or other, u or 2'-deoxythymidine-3'-phosphate
  misc_difference 21: note = modified_base - a, c, t, g, unknown or other, u or 2'-deoxythymidine-3'-phosphate
gatggcaggactgcctcggnn

SEQ ID NO: 303 - RNA, 21 nt, synthetic construct
  source 1..21: mol_type = other RNA; note = Description of Artificial Sequence: Synthetic oligonucleotide; note = Description of Combined DNA/RNA Molecule: Synthetic oligonucleotide
  misc_difference 20: note = modified_base - a, c, t, g, unknown or other, u or 2'-deoxythymidine-3'-phosphate
  misc_difference 21: note = modified_base - a, c, t, g, unknown or other, u or 2'-deoxythymidine-3'-phosphate
cagtcctgccatcaatgtgnn

SEQ ID NO: 304 - RNA, 21 nt, synthetic construct
  source 1..21: mol_type = other RNA; note = Description of Artificial Sequence: Synthetic oligonucleotide; note = Description of Combined DNA/RNA Molecule: Synthetic oligonucleotide
  misc_difference 20: note = modified_base - a, c, t, g, unknown or other, u or 2'-deoxythymidine-3'-phosphate
  misc_difference 21: note = modified_base - a, c, t, g, unknown or other, u or 2'-deoxythymidine-3'-phosphate
cacattgatggcaggactgnn

SEQ ID NO: 305 - RNA, 21 nt, synthetic construct
  source 1..21: mol_type = other RNA; note = Description of Artificial Sequence: Synthetic oligonucleotide; note = Description of Combined DNA/RNA Molecule: Synthetic oligonucleotide
  misc_difference 20: note = modified_base - a, c, t, g, unknown or other, u or 2'-deoxythymidine-3'-phosphate
  misc_difference 21: note = modified_base - a, c, t, g, unknown or other, u or 2'-deoxythymidine-3'-phosphate
caatgtggccgtgcatgtgnn

SEQ ID NO: 306 - RNA, 21 nt, synthetic construct
  source 1..21: mol_type = other RNA; note = Description of Artificial Sequence: Synthetic oligonucleotide; note = Description of Combined DNA/RNA Molecule: Synthetic oligonucleotide
  misc_difference 20: note = modified_base - a, c, t, g, unknown or other, u or 2'-deoxythymidine-3'-phosphate
  misc_difference 21: note = modified_base - a, c, t, g, unknown or other, u or 2'-deoxythymidine-3'-phosphate
cacatgcacggccacattgnn

SEQ ID NO: 307 - RNA, 21 nt, synthetic construct
  source 1..21: mol_type = other RNA; note = Description of Artificial Sequence: Synthetic oligonucleotide; note = Description of Combined DNA/RNA Molecule: Synthetic oligonucleotide
  misc_difference 20: note = modified_base - a, c, t, g, unknown or other, u or 2'-deoxythymidine-3'-phosphate
  misc_difference 21: note = modified_base - a, c, t, g, unknown or other, u or 2'-deoxythymidine-3'-phosphate
atgtgttcagaaaggctgcnn

SEQ ID NO: 308 - RNA, 21 nt, synthetic construct
  source 1..21: mol_type = other RNA; note = Description of Artificial Sequence: Synthetic oligonucleotide; note = Description of Combined DNA/RNA Molecule: Synthetic oligonucleotide
  misc_difference 20: note = modified_base - a, c, t, g, unknown or other, u or 2'-deoxythymidine-3'-phosphate
  misc_difference 21: note = modified_base - a, c, t, g, unknown or other, u or 2'-deoxythymidine-3'-phosphate
gcagcctttctgaacacatnn

SEQ ID NO: 309 - RNA, 21 nt, synthetic construct
  source 1..21: mol_type = other RNA; note = Description of Artificial Sequence: Synthetic oligonucleotide; note = Description of Combined DNA/RNA Molecule: Synthetic oligonucleotide
  misc_difference 20: note = modified_base - a, c, t, g, unknown or other, u or 2'-deoxythymidine-3'-phosphate
  misc_difference 21: note = modified_base - a, c, t, g, unknown or other, u or 2'-deoxythymidine-3'-phosphate
cagaagtccactcattcttnn

SEQ ID NO: 310 - RNA, 21 nt, synthetic construct
  source 1..21: mol_type = other RNA; note = Description of Artificial Sequence: Synthetic oligonucleotide; note = Description of Combined DNA/RNA Molecule: Synthetic oligonucleotide
  misc_difference 20: note = modified_base - a, c, t, g, unknown or other, u or 2'-deoxythymidine-3'-phosphate
  misc_difference 21: note = modified_base - a, c, t, g, unknown or other, u or 2'-deoxythymidine-3'-phosphate
aagaatgagtggacttctgnn

SEQ ID NO: 311 - RNA, 21 nt, synthetic construct
  source 1..21: mol_type = other RNA; note = Description of Artificial Sequence: Synthetic oligonucleotide; note = Description of Combined DNA/RNA Molecule: Synthetic oligonucleotide
  misc_difference 20: note = modified_base - a, c, t, g, unknown or other, u or 2'-deoxythymidine-3'-phosphate
  misc_difference 21: note = modified_base - a, c, t, g, unknown or other, u or 2'-deoxythymidine-3'-phosphate
ggcaggatggcttctcatcnn

SEQ ID NO: 312 - RNA, 21 nt, synthetic construct
  source 1..21: mol_type = other RNA; note = Description of Artificial Sequence: Synthetic oligonucleotide; note = Description of Combined DNA/RNA Molecule: Synthetic oligonucleotide
  misc_difference 20: note = modified_base - a, c, t, g, unknown or other, u or 2'-deoxythymidine-3'-phosphate
  misc_difference 21: note = modified_base - a, c, t, g, unknown or other, u or 2'-deoxythymidine-3'-phosphate
gatgagaagccatcctgccnn

SEQ ID NO: 313 - RNA, 21 nt, synthetic construct
  source 1..21: mol_type = other RNA; note = Description of Artificial Sequence: Synthetic oligonucleotide; note = Description of Combined DNA/RNA Molecule: Synthetic oligonucleotide
  misc_difference 20: note = modified_base - a, c, t, g, unknown or other, u or 2'-deoxythymidine-3'-phosphate
  misc_difference 21: note = modified_base - a, c, t, g, unknown or other, u or 2'-deoxythymidine-3'-phosphate
gagccatttgcctctgggann

SEQ ID NO: 314 - RNA, 21 nt, synthetic construct
  source 1..21: mol_type = other RNA; note = Description of Artificial Sequence: Synthetic oligonucleotide; note = Description of Combined DNA/RNA Molecule: Synthetic oligonucleotide
  misc_difference 20: note = modified_base - a, c, t, g, unknown or other, u or 2'-deoxythymidine-3'-phosphate
  misc_difference 21: note = modified_base - a, c, t, g, unknown or other, u or 2'-deoxythymidine-3'-phosphate
tcccagaggcaaatggctcnn

SEQ ID NO: 315 - RNA, 21 nt, synthetic construct
  source 1..21: mol_type = other RNA; note = Description of Artificial Sequence: Synthetic oligonucleotide; note = Description of Combined DNA/RNA Molecule: Synthetic oligonucleotide
  misc_difference 20: note = modified_base - a, c, t, g, unknown or other, u or 2'-deoxythymidine-3'-phosphate
  misc_difference 21: note = modified_base - a, c, t, g, unknown or other, u or 2'-deoxythymidine-3'-phosphate
caggatggcttctcatcgtnn

SEQ ID NO: 316 - RNA, 21 nt, synthetic construct
  source 1..21: mol_type = other RNA; note = Description of Artificial Sequence: Synthetic oligonucleotide; note = Description of Combined DNA/RNA Molecule: Synthetic oligonucleotide
  misc_difference 20: note = modified_base - a, c, t, g, unknown or other, u or 2'-deoxythymidine-3'-phosphate
  misc_difference 21: note = modified_base - a, c, t, g, unknown or other, u or 2'-deoxythymidine-3'-phosphate
acgatgagaagccatcctgnn

SEQ ID NO: 317 - RNA, 21 nt, synthetic construct
  source 1..21: mol_type = other RNA; note = Description of Artificial Sequence: Synthetic oligonucleotide; note = Description of Combined DNA/RNA Molecule: Synthetic oligonucleotide
  misc_difference 20: note = modified_base - a, c, t, g, unknown or other, u or 2'-deoxythymidine-3'-phosphate
  misc_difference 21: note = modified_base - a, c, t, g, unknown or other, u or 2'-deoxythymidine-3'-phosphate
aggatggcttctcatcgtcnn

SEQ ID NO: 318 - RNA, 21 nt, synthetic construct
  source 1..21: mol_type = other RNA; note = Description of Artificial Sequence: Synthetic oligonucleotide; note = Description of Combined DNA/RNA Molecule: Synthetic oligonucleotide
  misc_difference 20: note = modified_base - a, c, t, g, unknown or other, u or 2'-deoxythymidine-3'-phosphate
  misc_difference 21: note = modified_base - a, c, t, g, unknown or other, u or 2'-deoxythymidine-3'-phosphate
gacgatgagaagccatcctnn

SEQ ID NO: 319 - RNA, 21 nt, synthetic construct
  source 1..21: mol_type = other RNA; note = Description of Artificial Sequence: Synthetic oligonucleotide; note = Description of Combined DNA/RNA Molecule: Synthetic oligonucleotide
  misc_difference 20: note = modified_base - a, c, t, g, unknown or other, u or 2'-deoxythymidine-3'-phosphate
  misc_difference 21: note = modified_base - a, c, t, g, unknown or other, u or 2'-deoxythymidine-3'-phosphate
agagctgcatgggctcacann

SEQ ID NO: 320 - RNA, 21 nt, synthetic construct
  source 1..21: mol_type = other RNA; note = Description of Artificial Sequence: Synthetic oligonucleotide; note = Description of Combined DNA/RNA Molecule: Synthetic oligonucleotide
  misc_difference 20: note = modified_base - a, c, t, g, unknown or other, u or 2'-deoxythymidine-3'-phosphate
  misc_difference 21: note = modified_base - a, c, t, g, unknown or other, u or 2'-deoxythymidine-3'-phosphate
tgtgagcccatgcagctctnn

SEQ ID NO: 321 - RNA, 21 nt, synthetic construct
  source 1..21: mol_type = other RNA; note = Description of Artificial Sequence: Synthetic oligonucleotide; note = Description of Combined DNA/RNA Molecule: Synthetic oligonucleotide
  misc_difference 20: note = modified_base - a, c, t, g, unknown or other, u or 2'-deoxythymidine-3'-phosphate
  misc_difference 21: note = modified_base - a, c, t, g, unknown or other, u or 2'-deoxythymidine-3'-phosphate
gctgcatgggctcacaactnn

SEQ ID NO: 322 - RNA, 21 nt, synthetic construct
  source 1..21: mol_type = other RNA; note = Description of Artificial Sequence: Synthetic oligonucleotide; note = Description of Combined DNA/RNA Molecule: Synthetic oligonucleotide
  misc_difference 20: note = modified_base - a, c, t, g, unknown or other, u or 2'-deoxythymidine-3'-phosphate
  misc_difference 21: note = modified_base - a, c, t, g, unknown or other, u or 2'-deoxythymidine-3'-phosphate
agttgtgagcccatgcagcnn

SEQ ID NO: 323 - RNA, 21 nt, synthetic construct
  source 1..21: mol_type = other RNA; note = Description of Artificial Sequence: Synthetic oligonucleotide; note = Description of Combined DNA/RNA Molecule: Synthetic oligonucleotide
  misc_difference 20: note = modified_base - a, c, t, g, unknown or other, u or 2'-deoxythymidine-3'-phosphate
  misc_difference 21: note = modified_base - a, c, t, g, unknown or other, u or 2'-deoxythymidine-3'-phosphate
ggatggcttctcatcgtctnn

SEQ ID NO: 324 - RNA, 21 nt, synthetic construct
  source 1..21: mol_type = other RNA; note = Description of Artificial Sequence: Synthetic oligonucleotide; note = Description of Combined DNA/RNA Molecule: Synthetic oligonucleotide
  misc_difference 20: note = modified_base - a, c, t, g, unknown or other, u or 2'-deoxythymidine-3'-phosphate
  misc_difference 21: note = modified_base - a, c, t, g, unknown or other, u or 2'-deoxythymidine-3'-phosphate
agacgatgagaagccatccnn

SEQ ID NO: 325 - RNA, 21 nt, synthetic construct
  source 1..21: mol_type = other RNA; note = Description of Artificial Sequence: Synthetic oligonucleotide; note = Description of Combined DNA/RNA Molecule: Synthetic oligonucleotide
  misc_difference 20: note = modified_base - a, c, t, g, unknown or other, u or 2'-deoxythymidine-3'-phosphate
  misc_difference 21: note = modified_base - a, c, t, g, unknown or other, u or 2'-deoxythymidine-3'-phosphate
gcatgggctcacaactgagnn

SEQ ID NO: 326 - RNA, 21 nt, synthetic construct
  source 1..21: mol_type = other RNA; note = Description of Artificial Sequence: Synthetic oligonucleotide; note = Description of Combined DNA/RNA Molecule: Synthetic oligonucleotide
  misc_difference 20: note = modified_base - a, c, t, g, unknown or other, u or 2'-deoxythymidine-3'-phosphate
  misc_difference 21: note = modified_base - a, c, t, g, unknown or other, u or 2'-deoxythymidine-3'-phosphate
ctcagttgtgagcccatgcnn

SEQ ID NO: 327 - RNA, 21 nt, synthetic construct
  source 1..21: mol_type = other RNA; note = Description of Artificial Sequence: Synthetic oligonucleotide; note = Description of Combined DNA/RNA Molecule: Synthetic oligonucleotide
  misc_difference 20: note = modified_base - a, c, t, g, unknown or other, u or 2'-deoxythymidine-3'-phosphate
  misc_difference 21: note = modified_base - a, c, t, g, unknown or other, u or 2'-deoxythymidine-3'-phosphate
atgggctcacaactgaggann

SEQ ID NO: 328 - RNA, 21 nt, synthetic construct
  source 1..21: mol_type = other RNA; note = Description of Artificial Sequence: Synthetic oligonucleotide; note = Description of Combined DNA/RNA Molecule: Synthetic oligonucleotide
  misc_difference 20: note = modified_base - a, c, t, g, unknown or other, u or 2'-deoxythymidine-3'-phosphate
  misc_difference 21: note = modified_base - a, c, t, g, unknown or other, u or 2'-deoxythymidine-3'-phosphate
tcctcagttgtgagcccatnn

SEQ ID NO: 329 - RNA, 21 nt, synthetic construct
  source 1..21: mol_type = other RNA; note = Description of Artificial Sequence: Synthetic oligonucleotide; note = Description of Combined DNA/RNA Molecule: Synthetic oligonucleotide
  misc_difference 20: note = modified_base - a, c, t, g, unknown or other, u or 2'-deoxythymidine-3'-phosphate
  misc_difference 21: note = modified_base - a, c, t, g, unknown or other, u or 2'-deoxythymidine-3'-phosphate
tgggctcacaactgaggagnn

SEQ ID NO: 330 - RNA, 21 nt, synthetic construct
  source 1..21: mol_type = other RNA; note = Description of Artificial Sequence: Synthetic oligonucleotide; note = Description of Combined DNA/RNA Molecule: Synthetic oligonucleotide
  misc_difference 20: note = modified_base - a, c, t, g, unknown or other, u or 2'-deoxythymidine-3'-phosphate
  misc_difference 21: note = modified_base - a, c, t, g, unknown or other, u or 2'-deoxythymidine-3'-phosphate
ctcctcagttgtgagcccann

SEQ ID NO: 331 - RNA, 21 nt, synthetic construct
  source 1..21: mol_type = other RNA; note = Description of Artificial Sequence: Synthetic oligonucleotide; note = Description of Combined DNA/RNA Molecule: Synthetic oligonucleotide
  misc_difference 20: note = modified_base - a, c, t, g, unknown or other, u or 2'-deoxythymidine-3'-phosphate
  misc_difference 21: note = modified_base - a, c, t, g, unknown or other, u or 2'-deoxythymidine-3'-phosphate
gaggaatttgtagaagggann

SEQ ID NO: 332 - RNA, 21 nt, synthetic construct
  source 1..21: mol_type = other RNA; note = Description of Artificial Sequence: Synthetic oligonucleotide; note = Description of Combined DNA/RNA Molecule: Synthetic oligonucleotide
  misc_difference 20: note = modified_base - a, c, t, g, unknown or other, u or 2'-deoxythymidine-3'-phosphate
  misc_difference 21: note = modified_base - a, c, t, g, unknown or other, u or 2'-deoxythymidine-3'-phosphate
tcccttctacaaattcctcnn

SEQ ID NO: 333 - RNA, 21 nt, synthetic construct
  source 1..21: mol_type = other RNA; note = Description of Artificial Sequence: Synthetic oligonucleotide; note = Description of Combined DNA/RNA Molecule: Synthetic oligonucleotide
  misc_difference 20: note = modified_base - a, c, t, g, unknown or other, u or 2'-deoxythymidine-3'-phosphate
  misc_difference 21: note = modified_base - a, c, t, g, unknown or other, u or 2'-deoxythymidine-3'-phosphate
tttgtagaagggatatacann

SEQ ID NO: 334 - RNA, 21 nt, synthetic construct
  source 1..21: mol_type = other RNA; note = Description of Artificial Sequence: Synthetic oligonucleotide; note = Description of Combined DNA/RNA Molecule: Synthetic oligonucleotide
  misc_difference 20: note = modified_base - a, c, t, g, unknown or other, u or 2'-deoxythymidine-3'-phosphate
  misc_difference 21: note = modified_base - a, c, t, g, unknown or other, u or 2'-deoxythymidine-3'-phosphate
tgtatatcccttctacaaann

SEQ ID NO: 335 - RNA, 21 nt, synthetic construct
  source 1..21: mol_type = other RNA; note = Description of Artificial Sequence: Synthetic oligonucleotide; note = Description of Combined DNA/RNA Molecule: Synthetic oligonucleotide
  misc_difference 20: note = modified_base - a, c, t, g, unknown or other, u or 2'-deoxythymidine-3'-phosphate
  misc_difference 21: note = modified_base - a, c, t, g, unknown or other, u or 2'-deoxythymidine-3'-phosphate
ttgtagaagggatatacaann

SEQ ID NO: 336 - RNA, 21 nt, synthetic construct
  source 1..21: mol_type = other RNA; note = Description of Artificial Sequence: Synthetic oligonucleotide; note = Description of Combined DNA/RNA Molecule: Synthetic oligonucleotide
  misc_difference 20: note = modified_base - a, c, t, g, unknown or other, u or 2'-deoxythymidine-3'-phosphate
  misc_difference 21: note = modified_base - a, c, t, g, unknown or other, u or 2'-deoxythymidine-3'-phosphate
ttgtatatcccttctacaann

SEQ ID NO: 337 - RNA, 21 nt, synthetic construct
  source 1..21: mol_type = other RNA; note = Description of Artificial Sequence: Synthetic oligonucleotide; note = Description of Combined DNA/RNA Molecule: Synthetic oligonucleotide
  misc_difference 20: note = modified_base - a, c, t, g, unknown or other, u or 2'-deoxythymidine-3'-phosphate
  misc_difference 21: note = modified_base - a, c, t, g, unknown or other, u or 2'-deoxythymidine-3'-phosphate
tgtagaagggatatacaaann

SEQ ID NO: 338 - RNA, 21 nt, synthetic construct
  source 1..21: mol_type = other RNA; note = Description of Artificial Sequence: Synthetic oligonucleotide; note = Description of Combined DNA/RNA Molecule: Synthetic oligonucleotide
  misc_difference 20: note = modified_base - a, c, t, g, unknown or other, u or 2'-deoxythymidine-3'-phosphate
  misc_difference 21: note = modified_base - a, c, t, g, unknown or other, u or 2'-deoxythymidine-3'-phosphate
tttgtatatcccttctacann

SEQ ID NO: 339 - RNA, 21 nt, synthetic construct
  source 1..21: mol_type = other RNA; note = Description of Artificial Sequence: Synthetic oligonucleotide; note = Description of Combined DNA/RNA Molecule: Synthetic oligonucleotide
  misc_difference 20: note = modified_base - a, c, t, g, unknown or other, u or 2'-deoxythymidine-3'-phosphate
  misc_difference 21: note = modified_base - a, c, t, g, unknown or other, u or 2'-deoxythymidine-3'-phosphate
agaagggatatacaaagtgnn

SEQ ID NO: 340 - RNA, 21 nt, synthetic construct
  source 1..21: mol_type = other RNA; note = Description of Artificial Sequence: Synthetic oligonucleotide; note = Description of Combined DNA/RNA Molecule: Synthetic oligonucleotide
  misc_difference 20: note = modified_base - a, c, t, g, unknown or other, u or 2'-deoxythymidine-3'-phosphate
  misc_difference 21: note = modified_base - a, c, t, g, unknown or other, u or 2'-deoxythymidine-3'-phosphate
cactttgtatatcccttctnn

SEQ ID NO: 341 - RNA, 21 nt, synthetic construct
  source 1..21: mol_type = other RNA; note = Description of Artificial Sequence: Synthetic oligonucleotide; note = Description of Combined DNA/RNA Molecule: Synthetic oligonucleotide
  misc_difference 20: note = modified_base - a, c, t, g, unknown or other, u or 2'-deoxythymidine-3'-phosphate
  misc_difference 21: note = modified_base - a, c, t, g, unknown or other, u or 2'-deoxythymidine-3'-phosphate
aagtggaaatagacaccaann

SEQ ID NO: 342 - RNA, 21 nt, synthetic construct
  source 1..21: mol_type = other RNA; note = Description of Artificial Sequence: Synthetic oligonucleotide; note = Description of Combined DNA/RNA Molecule: Synthetic oligonucleotide
  misc_difference 20: note = modified_base - a, c, t, g, unknown or other, u or 2'-deoxythymidine-3'-phosphate
  misc_difference 21: note = modified_base - a, c, t, g, unknown or other, u or 2'-deoxythymidine-3'-phosphate
ttggtgtctatttccacttnn

SEQ ID NO: 343 - RNA, 21 nt, synthetic construct
  source 1..21: mol_type = other RNA; note = Description of Artificial Sequence: Synthetic oligonucleotide; note = Description of Combined DNA/RNA Molecule: Synthetic oligonucleotide
  misc_difference 20: note = modified_base - a, c, t, g, unknown or other, u or 2'-deoxythymidine-3'-phosphate
  misc_difference 21: note = modified_base - a, c, t, g, unknown or other, u or 2'-deoxythymidine-3'-phosphate
ggaaatagacaccaaatctnn

SEQ ID NO: 344 - RNA, 21 nt, synthetic construct
  source 1..21: mol_type = other RNA; note = Description of Artificial Sequence: Synthetic oligonucleotide; note = Description of Combined DNA/RNA Molecule: Synthetic oligonucleotide
  misc_difference 20: note = modified_base - a, c, t, g, unknown or other, u or 2'-deoxythymidine-3'-phosphate
  misc_difference 21: note = modified_base - a, c, t, g, unknown or other, u or 2'-deoxythymidine-3'-phosphate
agatttggtgtctatttccnn

SEQ ID NO: 345 - RNA, 21 nt, synthetic construct
  source 1..21: mol_type = other RNA; note = Description of Artificial Sequence: Synthetic oligonucleotide; note = Description of Combined DNA/RNA Molecule: Synthetic oligonucleotide
  misc_difference 20: note = modified_base - a, c, t, g, unknown or other, u or 2'-deoxythymidine-3'-phosphate
  misc_difference 21: note = modified_base - a, c, t, g, unknown or other, u or 2'-deoxythymidine-3'-phosphate
gaaatagacaccaaatcttnn

SEQ ID NO: 346 - RNA, 21 nt, synthetic construct
  source 1..21: mol_type = other RNA; note = Description of Artificial Sequence: Synthetic oligonucleotide; note = Description of Combined DNA/RNA Molecule: Synthetic oligonucleotide
  misc_difference 20: note = modified_base - a, c, t, g, unknown or other, u or 2'-deoxythymidine-3'-phosphate
  misc_difference 21: note = modified_base - a, c, t, g, unknown or other, u or 2'-deoxythymidine-3'-phosphate
aagatttggtgtctatttcnn

SEQ ID NO: 347 - RNA, 21 nt, synthetic construct
  source 1..21: mol_type = other RNA; note = Description of Artificial Sequence: Synthetic oligonucleotide; note = Description of Combined DNA/RNA Molecule: Synthetic oligonucleotide
  misc_difference 20: note = modified_base - a, c, t, g, unknown or other, u or 2'-deoxythymidine-3'-phosphate
  misc_difference 21: note = modified_base - a, c, t, g, unknown or other, u or 2'-deoxythymidine-3'-phosphate
atagacaccaaatcttactnn

SEQ ID NO: 348 - RNA, 21 nt, synthetic construct
  source 1..21: mol_type = other RNA; note = Description of Artificial Sequence: Synthetic oligonucleotide; note = Description of Combined DNA/RNA Molecule: Synthetic oligonucleotide
  misc_difference 20: note = modified_base - a, c, t, g, unknown or other, u or 2'-deoxythymidine-3'-phosphate
  misc_difference 21: note = modified_base - a, c, t, g, unknown or other, u or 2'-deoxythymidine-3'-phosphate
agtaagatttggtgtctatnn

SEQ ID NO: 349 - RNA, 21 nt, synthetic construct
  source 1..21: mol_type = other RNA; note = Description of Artificial Sequence: Synthetic oligonucleotide; note = Description of Combined DNA/RNA Molecule: Synthetic oligonucleotide
  misc_difference 20: note = modified_base - a, c, t, g, unknown or other, u or 2'-deoxythymidine-3'-phosphate
  misc_difference 21: note = modified_base - a, c, t, g, unknown or other, u or 2'-deoxythymidine-3'-phosphate
tagacaccaaatcttactgnn

SEQ ID NO: 350 - RNA, 21 nt, synthetic construct
  source 1..21: mol_type = other RNA; note = Description of Artificial Sequence: Synthetic oligonucleotide; note = Description of Combined DNA/RNA Molecule: Synthetic oligonucleotide
  misc_difference 20: note = modified_base - a, c, t, g, unknown or other, u or 2'-deoxythymidine-3'-phosphate
  misc_difference 21: note = modified_base - a, c, t, g, unknown or other, u or 2'-deoxythymidine-3'-phosphate
cagtaagatttggtgtctann

SEQ ID NO: 351 - RNA, 21 nt, synthetic construct
  source 1..21: mol_type = other RNA; note = Description of Artificial Sequence: Synthetic oligonucleotide; note = Description of Combined DNA/RNA Molecule: Synthetic oligonucleotide
  misc_difference 20: note = modified_base - a, c, t, g, unknown or other, u or 2'-deoxythymidine-3'-phosphate
  misc_difference 21: note = modified_base - a, c, t, g, unknown or other, u or 2'-deoxythymidine-3'-phosphate
agacaccaaatcttactggnn

SEQ ID NO: 352 - RNA, 21 nt, synthetic construct
  source 1..21: mol_type = other RNA; note = Description of Artificial Sequence: Synthetic oligonucleotide; note = Description of Combined DNA/RNA Molecule: Synthetic oligonucleotide
  misc_difference 20: note = modified_base - a, c, t, g, unknown or other, u or 2'-deoxythymidine-3'-phosphate
  misc_difference 21: note = modified_base - a, c, t, g, unknown or other, u or 2'-deoxythymidine-3'-phosphate
ccagtaagatttggtgtctnn

SEQ ID NO: 353 - RNA, 21 nt, synthetic construct
  source 1..21: mol_type = other RNA; note = Description of Artificial Sequence: Synthetic oligonucleotide; note = Description of Combined DNA/RNA Molecule: Synthetic oligonucleotide
  misc_difference 20: note = modified_base - a, c, t, g, unknown or other, u or 2'-deoxythymidine-3'-phosphate
  misc_difference 21: note = modified_base - a, c, t, g, unknown or other, u or 2'-deoxythymidine-3'-phosphate
ttactggaaggcacttggcnn

SEQ ID NO: 354 - RNA, 21 nt, synthetic construct
  source 1..21: mol_type = other RNA; note = Description of Artificial Sequence: Synthetic oligonucleotide; note = Description of Combined DNA/RNA Molecule: Synthetic oligonucleotide
  misc_difference 20: note = modified_base - a, c, t, g, unknown or other, u or 2'-deoxythymidine-3'-phosphate
  misc_difference 21: note = modified_base - a, c, t, g, unknown or other, u or 2'-deoxythymidine-3'-phosphate
gccaagtgccttccagtaann

SEQ ID NO: 355 - RNA, 21 nt, synthetic construct
  source 1..21: mol_type = other RNA; note = Description of Artificial Sequence: Synthetic oligonucleotide; note = Description of Combined DNA/RNA Molecule: Synthetic oligonucleotide
  misc_difference 20: note = modified_base - a, c, t, g, unknown or other, u or 2'-deoxythymidine-3'-phosphate
  misc_difference 21: note = modified_base - a, c, t, g, unknown or other, u or 2'-deoxythymidine-3'-phosphate
ttctcatcgtctgctcctcnn

SEQ ID NO: 356 - RNA, 21 nt, synthetic construct
  source 1..21: mol_type = other RNA; note = Description of Artificial Sequence: Synthetic oligonucleotide; note = Description of Combined DNA/RNA Molecule: Synthetic oligonucleotide
  misc_difference 20: note = modified_base - a, c, t, g, unknown or other, u or 2'-deoxythymidine-3'-phosphate
  misc_difference 21: note = modified_base - a, c, t, g, unknown or other, u or 2'-deoxythymidine-3'-phosphate
gaggagcagacgatgagaann

SEQ ID NO: 357 - RNA, 21 nt, synthetic construct
  source 1..21: mol_type = other RNA; note = Description of Artificial Sequence: Synthetic oligonucleotide; note = Description of Combined DNA/RNA Molecule: Synthetic oligonucleotide
  misc_difference 20: note = modified_base - a, c, t, g, unknown or other, u or 2'-deoxythymidine-3'-phosphate
  misc_difference 21: note = modified_base - a, c, t, g, unknown or other, u or 2'-deoxythymidine-3'-phosphate
ggaaggcacttggcatctcnn

SEQ ID NO: 358 - RNA, 21 nt, synthetic construct
  source 1..21: mol_type = other RNA; note = Description of Artificial Sequence: Synthetic oligonucleotide; note = Description of Combined DNA/RNA Molecule: Synthetic oligonucleotide
  misc_difference 20: note = modified_base - a, c, t, g, unknown or other, u or 2'-deoxythymidine-3'-phosphate
  misc_difference 21: note = modified_base - a, c, t, g, unknown or other, u or 2'-deoxythymidine-3'-phosphate
gagatgccaagtgccttccnn

SEQ ID NO: 359 - RNA, 21 nt, synthetic construct
  source 1..21: mol_type = other RNA; note = Description of Artificial Sequence: Synthetic oligonucleotide; note = Description of Combined DNA/RNA Molecule: Synthetic oligonucleotide
  misc_difference 20: note = modified_base - a, c, t, g, unknown or other, u or 2'-deoxythymidine-3'-phosphate
  misc_difference 21: note = modified_base - a, c, t, g, unknown or other, u or 2'-deoxythymidine-3'-phosphate
ggcacttggcatctccccann

SEQ ID NO: 360 - RNA, 21 nt, synthetic construct
  source 1..21: mol_type = other RNA; note = Description of Artificial Sequence: Synthetic oligonucleotide; note = Description of Combined DNA/RNA Molecule: Synthetic oligonucleotide
  misc_difference 20: note = modified_base - a, c, t, g, unknown or other, u or 2'-deoxythymidine-3'-phosphate
  misc_difference 21: note = modified_base - a, c, t, g, unknown or other, u or 2'-deoxythymidine-3'-phosphate
tggggagatgccaagtgccnn

SEQ ID NO: 361 - RNA, 21 nt, synthetic construct
  source 1..21: mol_type = other RNA; note = Description of Artificial Sequence: Synthetic oligonucleotide; note = Description of Combined DNA/RNA Molecule: Synthetic oligonucleotide
  misc_difference 20: note = modified_base - a, c, t, g, unknown or other, u or 2'-deoxythymidine-3'-phosphate
  misc_difference 21: note = modified_base - a, c, t, g, unknown or other, u or 2'-deoxythymidine-3'-phosphate
ggcatctccccattccatgnn

SEQ ID NO: 362 - DNA, 22 bp, synthetic construct
  source 1..22: mol_type = other DNA; note = Description of Artificial Sequence: Synthetic oligonucleotide; note = Description of Combined DNA/RNA Molecule: Synthetic oligonucleotide
  misc_difference 21: note = modified_base - a, c, t, g, unknown or other, u or 2'-deoxythymidine-3'-phosphate
  misc_difference 22: note = modified_base - a, c, t, g, unknown or other, u or 2'-deoxythymidine-3'-phosphate
  misc_feature 1..18: note = RNA
  misc_feature 19..20: note = DNA
  misc_feature 21..22: note = RNA
atggaatggggagatgccttnn

SEQ ID NO: 363 - RNA, 21 nt, synthetic construct
  source 1..21: mol_type = other RNA; note = Description of Artificial Sequence: Synthetic oligonucleotide; note = Description of Combined DNA/RNA Molecule: Synthetic oligonucleotide
  misc_difference 20: note = modified_base - a, c, t, g, unknown or other, u or 2'-deoxythymidine-3'-phosphate
  misc_difference 21: note = modified_base - a, c, t, g, unknown or other, u or 2'-deoxythymidine-3'-phosphate
gcatctccccattccatgann

SEQ ID NO: 364 - RNA, 21 nt, synthetic construct
  source 1..21: mol_type = other RNA; note = Description of Artificial Sequence: Synthetic oligonucleotide; note = Description of Combined DNA/RNA Molecule: Synthetic oligonucleotide
  misc_difference 20: note = modified_base - a, c, t, g, unknown or other, u or 2'-deoxythymidine-3'-phosphate
  misc_difference 21: note = modified_base - a, c, t, g, unknown or other, u or 2'-deoxythymidine-3'-phosphate
tcatggaatggggagatgcnn

SEQ ID NO: 365 - RNA, 21 nt, synthetic construct
  source 1..21: mol_type = other RNA; note = Description of Artificial Sequence: Synthetic oligonucleotide; note = Description of Combined DNA/RNA Molecule: Synthetic oligonucleotide
  misc_difference 20: note = modified_base - a, c, t, g, unknown or other, u or 2'-deoxythymidine-3'-phosphate
  misc_difference 21: note = modified_base - a, c, t, g, unknown or other, u or 2'-deoxythymidine-3'-phosphate
catctccccattccatgagnn

SEQ ID NO: 366 - RNA, 21 nt, synthetic construct
  source 1..21: mol_type = other RNA; note = Description of Artificial Sequence: Synthetic oligonucleotide; note = Description of Combined DNA/RNA Molecule: Synthetic oligonucleotide
  misc_difference 20: note = modified_base - a, c, t, g, unknown or other, u or 2'-deoxythymidine-3'-phosphate
  misc_difference 21: note = modified_base - a, c, t, g, unknown or other, u or 2'-deoxythymidine-3'-phosphate
ctcatggaatggggagatgnn

SEQ ID NO: 367 - RNA, 21 nt, synthetic construct
  source 1..21: mol_type = other RNA; note = Description of Artificial Sequence: Synthetic oligonucleotide; note = Description of Combined DNA/RNA Molecule: Synthetic oligonucleotide
  misc_difference 20: note = modified_base - a, c, t, g, unknown or other, u or 2'-deoxythymidine-3'-phosphate
  misc_difference 21: note = modified_base - a, c, t, g, unknown or other, u or 2'-deoxythymidine-3'-phosphate
atctccccattccatgagcnn

SEQ ID NO: 368 - RNA, 21 nt, synthetic construct
  source 1..21: mol_type = other RNA; note = Description of Artificial Sequence: Synthetic oligonucleotide; note = Description of Combined DNA/RNA Molecule: Synthetic oligonucleotide
  misc_difference 20: note = modified_base - a, c, t, g, unknown or other, u or 2'-deoxythymidine-3'-phosphate
  misc_difference 21: note = modified_base - a, c, t, g, unknown or other, u or 2'-deoxythymidine-3'-phosphate
gctcatggaatggggagatnn

SEQ ID NO: 369 - RNA, 21 nt, synthetic construct
  source 1..21: mol_type = other RNA; note = Description of Artificial Sequence: Synthetic oligonucleotide; note = Description of Combined DNA/RNA Molecule: Synthetic oligonucleotide
  misc_difference 20: note = modified_base - a, c, t, g, unknown or other, u or 2'-deoxythymidine-3'-phosphate
  misc_difference 21: note = modified_base - a, c, t, g, unknown or other, u or 2'-deoxythymidine-3'-phosphate
ctccccattccatgagcatnn

SEQ ID NO: 370 - RNA, 21 nt, synthetic construct
  source 1..21: mol_type = other RNA; note = Description of Artificial Sequence: Synthetic oligonucleotide; note = Description of Combined DNA/RNA Molecule: Synthetic oligonucleotide
  misc_difference 20: note = modified_base - a, c, t, g, unknown or other, u or 2'-deoxythymidine-3'-phosphate
  misc_difference 21: note = modified_base - a, c, t, g, unknown or other, u or 2'-deoxythymidine-3'-phosphate
atgctcatggaatggggagnn

SEQ ID NO: 371 - RNA, 21 nt, synthetic construct
  source 1..21: mol_type = other RNA; note = Description of Artificial Sequence: Synthetic oligonucleotide; note = Description of Combined DNA/RNA Molecule: Synthetic oligonucleotide
  misc_difference 20: note = modified_base - a, c, t, g, unknown or other, u or 2'-deoxythymidine-3'-phosphate
  misc_difference 21: note = modified_base - a, c, t, g, unknown or other, u or 2'-deoxythymidine-3'-phosphate
cccattccatgagcatgcann

SEQ ID NO: 372 - RNA, 21 nt, synthetic construct
  source 1..21: mol_type = other RNA; note = Description of Artificial Sequence: Synthetic oligonucleotide; note = Description of Combined DNA/RNA Molecule: Synthetic oligonucleotide
  misc_difference 20: note = modified_base - a, c, t, g, unknown or other, u or 2'-deoxythymidine-3'-phosphate
  misc_difference 21: note = modified_base - a, c, t, g, unknown or other, u or 2'-deoxythymidine-3'-phosphate
tgcatgctcatggaatgggnn

SEQ ID NO: 373 - RNA, 21 nt, synthetic construct
  source 1..21: mol_type = other RNA; note = Description of Artificial Sequence: Synthetic oligonucleotide; note = Description of Combined DNA/RNA Molecule: Synthetic oligonucleotide
  misc_difference 20: note = modified_base - a, c, t, g, unknown or other, u or 2'-deoxythymidine-3'-phosphate
  misc_difference 21: note = modified_base - a, c, t, g, unknown or other, u or 2'-deoxythymidine-3'-phosphate
ccatgagcatgcagaggtgnn

SEQ ID NO: 374 - RNA, 21 nt, synthetic construct
  source 1..21: mol_type = other RNA; note = Description of Artificial Sequence: Synthetic oligonucleotide; note = Description of Combined DNA/RNA Molecule: Synthetic oligonucleotide
  misc_difference 20: note = modified_base - a, c, t, g, unknown or other, u or 2'-deoxythymidine-3'-phosphate
  misc_difference 21: note = modified_base - a, c, t, g, unknown or other, u or 2'-deoxythymidine-3'-phosphate
cacctctgcatgctcatggnn

SEQ ID NO: 375 - RNA, 21 nt, synthetic construct
  source 1..21: mol_type = other RNA; note = Description of Artificial Sequence: Synthetic oligonucleotide; note = Description of Combined DNA/RNA Molecule: Synthetic oligonucleotide
  misc_difference 20: note = modified_base - a, c, t, g, unknown or other, u or 2'-deoxythymidine-3'-phosphate
  misc_difference 21: note = modified_base - a, c, t, g, unknown or other, u or 2'-deoxythymidine-3'-phosphate
agcatgcagaggtggtattnn

SEQ ID NO: 376 - RNA, 21 nt, synthetic construct
  source 1..21: mol_type = other RNA; note = Description of Artificial Sequence: Synthetic oligonucleotide; note = Description of Combined DNA/RNA Molecule: Synthetic oligonucleotide
  misc_difference 20: note = modified_base - a, c, t, g, unknown or other, u or 2'-deoxythymidine-3'-phosphate
  misc_difference 21: note = modified_base - a, c, t, g, unknown or other, u or 2'-deoxythymidine-3'-phosphate
aataccacctctgcatgctnn

SEQ ID NO: 377 - RNA, 21 nt, synthetic construct
  source 1..21: mol_type = other RNA; note = Description of Artificial Sequence: Synthetic oligonucleotide; note = Description of Combined DNA/RNA Molecule: Synthetic oligonucleotide
  misc_difference 20: note = modified_base - a, c, t, g, unknown or other, u or 2'-deoxythymidine-3'-phosphate
  misc_difference 21: note = modified_base - a, c, t, g, unknown or other, u or 2'-deoxythymidine-3'-phosphate
catgcagaggtggtattcann

SEQ ID NO: 378 - RNA, 21 nt, synthetic construct
  source 1..21: mol_type = other RNA; note = Description of Artificial Sequence: Synthetic oligonucleotide; note = Description of Combined DNA/RNA Molecule: Synthetic oligonucleotide
  misc_difference 20: note = modified_base - a, c, t, g, unknown or other, u or 2'-deoxythymidine-3'-phosphate
  misc_difference 21: note = modified_base - a, c, t, g, unknown or other, u or 2'-deoxythymidine-3'-phosphate
tgaataccacctctgcatgnn

SEQ ID NO: 379 - RNA, 21 nt, synthetic construct
  source 1..21: mol_type = other RNA; note = Description of Artificial Sequence: Synthetic oligonucleotide; note = Description of Combined DNA/RNA Molecule: Synthetic oligonucleotide
  misc_difference 20: note = modified_base - a, c, t, g, unknown or other, u or 2'-deoxythymidine-3'-phosphate
  misc_difference 21: note = modified_base - a, c, t, g, unknown or other, u or 2'-deoxythymidine-3'-phosphate
atgcagaggtggtattcacnn

SEQ ID NO: 380 - RNA, 21 nt, synthetic construct
  source 1..21: mol_type = other RNA; note = Description of Artificial Sequence: Synthetic oligonucleotide; note = Description of Combined DNA/RNA Molecule: Synthetic oligonucleotide
  misc_difference 20: note = modified_base - a, c, t, g, unknown or other, u or 2'-deoxythymidine-3'-phosphate
  misc_difference 21: note = modified_base - a, c, t, g, unknown or other, u or 2'-deoxythymidine-3'-phosphate
gtgaataccacctctgcatnn

SEQ ID NO: 381 - RNA, 21 nt, synthetic construct
  source 1..21: mol_type = other RNA; note = Description of Artificial Sequence: Synthetic oligonucleotide; note = Description of Combined DNA/RNA Molecule: Synthetic oligonucleotide
  misc_difference 20: note = modified_base - a, c, t, g, unknown or other, u or 2'-deoxythymidine-3'-phosphate
  misc_difference 21: note = modified_base - a, c, t, g, unknown or other, u or 2'-deoxythymidine-3'-phosphate
ggtggtattcacagccaacnn

SEQ ID NO: 382 - RNA, 21 nt, synthetic construct
  source 1..21: mol_type = other RNA; note = Description of Artificial Sequence: Synthetic oligonucleotide; note = Description of Combined DNA/RNA Molecule: Synthetic oligonucleotide
  misc_difference 20: note = modified_base - a, c, t, g, unknown or other, u or 2'-deoxythymidine-3'-phosphate
  misc_difference 21: note = modified_base - a, c, t, g, unknown or other, u or 2'-deoxythymidine-3'-phosphate
gttggctgtgaataccaccnn

SEQ ID NO: 383 - RNA, 21 nt, synthetic construct
  source 1..21: mol_type = other RNA; note = Description of Artificial Sequence: Synthetic oligonucleotide; note = Description of Combined DNA/RNA Molecule: Synthetic oligonucleotide
  misc_difference 20: note = modified_base - a, c, t, g, unknown or other, u or 2'-deoxythymidine-3'-phosphate
  misc_difference 21: note = modified_base - a, c, t, g, unknown or other, u or 2'-deoxythymidine-3'-phosphate
gtggtattcacagccaacgnn

SEQ ID NO: 384 - RNA, 21 nt, synthetic construct
  source 1..21: mol_type = other RNA; note = Description of Artificial Sequence: Synthetic oligonucleotide; note = Description of Combined DNA/RNA Molecule: Synthetic oligonucleotide
  misc_difference 20: note = modified_base - a, c, t, g, unknown or other, u or 2'-deoxythymidine-3'-phosphate
  misc_difference 21: note = modified_base - a, c, t, g, unknown or other, u or 2'-deoxythymidine-3'-phosphate
cgttggctgtgaataccacnn

SEQ ID NO: 385 - RNA, 21 nt, synthetic construct
  source 1..21: mol_type = other RNA; note = Description of Artificial Sequence: Synthetic oligonucleotide; note = Description of Combined DNA/RNA Molecule: Synthetic oligonucleotide
  misc_difference 20: note = modified_base - a, c, t, g, unknown or other, u or 2'-deoxythymidine-3'-phosphate
  misc_difference 21: note = modified_base - a, c, t, g, unknown or other, u or 2'-deoxythymidine-3'-phosphate
tggtattcacagccaacgann

SEQ ID NO: 386 - RNA, 21 nt, synthetic construct
  source 1..21: mol_type = other RNA; note = Description of Artificial Sequence: Synthetic oligonucleotide; note = Description of Combined DNA/RNA Molecule: Synthetic oligonucleotide
  misc_difference 20: note = modified_base - a, c, t, g, unknown or other, u or 2'-deoxythymidine-3'-phosphate
  misc_difference 21: note = modified_base - a, c, t, g, unknown or other, u or 2'-deoxythymidine-3'-phosphate
tcgttggctgtgaataccann

SEQ ID NO: 387 - RNA, 21 nt, synthetic construct
  source 1..21: mol_type = other RNA; note = Description of Artificial Sequence: Synthetic oligonucleotide; note = Description of Combined DNA/RNA Molecule: Synthetic oligonucleotide
  misc_difference 20: note = modified_base - a, c, t, g, unknown or other, u or 2'-deoxythymidine-3'-phosphate
  misc_difference 21: note = modified_base - a, c, t, g, unknown or other, u or 2'-deoxythymidine-3'-phosphate
ggtattcacagccaacgacnn

SEQ ID NO: 388 - RNA, 21 nt, synthetic construct
  source 1..21: mol_type = other RNA; note = Description of Artificial Sequence: Synthetic oligonucleotide; note = Description of Combined DNA/RNA Molecule: Synthetic oligonucleotide
  misc_difference 20: note = modified_base - a, c, t, g, unknown or other, u or 2'-deoxythymidine-3'-phosphate
  misc_difference 21: note = modified_base - a, c, t, g, unknown or other, u or 2'-deoxythymidine-3'-phosphate
gtcgttggctgtgaataccnn

SEQ ID NO: 389 - RNA, 21 nt, synthetic construct
  source 1..21: mol_type = other RNA; note = Description of Artificial Sequence: Synthetic oligonucleotide; note = Description of Combined DNA/RNA Molecule: Synthetic oligonucleotide
  misc_difference 20: note = modified_base - a, c, t, g, unknown or other, u or 2'-deoxythymidine-3'-phosphate
  misc_difference 21: note = modified_base - a, c, t, g, unknown or other, u or 2'-deoxythymidine-3'-phosphate
gtattcacagccaacgactnn

SEQ ID NO: 390 - RNA, 21 nt, synthetic construct
  source 1..21: mol_type = other RNA; note = Description of Artificial Sequence: Synthetic oligonucleotide; note = Description of Combined DNA/RNA Molecule: Synthetic oligonucleotide
  misc_difference 20: note = modified_base - a, c, t, g, unknown or other, u or 2'-deoxythymidine-3'-phosphate
  misc_difference 21: note = modified_base - a, c, t, g, unknown or other, u or 2'-deoxythymidine-3'-phosphate
agtcgttggctgtgaatacnn

SEQ ID NO: 391 - RNA, 21 nt, synthetic construct
  source 1..21: mol_type = other RNA; note = Description of Artificial Sequence: Synthetic oligonucleotide; note = Description of Combined DNA/RNA Molecule: Synthetic oligonucleotide
  misc_difference 20: note = modified_base - a, c, t, g, unknown or other, u or 2'-deoxythymidine-3'-phosphate
  misc_difference 21: note = modified_base - a, c, t, g, unknown or other, u or 2'-deoxythymidine-3'-phosphate
tattcacagccaacgactcnn

SEQ ID NO: 392 - RNA, 21 nt, synthetic construct
  source 1..21: mol_type = other RNA; note = Description of Artificial Sequence: Synthetic oligonucleotide; note = Description of Combined DNA/RNA Molecule: Synthetic oligonucleotide
  misc_difference 20: note = modified_base - a, c, t, g, unknown or other, u or 2'-deoxythymidine-3'-phosphate
  misc_difference 21: note = modified_base - a, c, t, g, unknown or other, u or 2'-deoxythymidine-3'-phosphate
gagtcgttggctgtgaatann

SEQ ID NO: 393 - RNA, 21 nt, synthetic construct
  source 1..21: mol_type = other RNA; note = Description of Artificial Sequence: Synthetic oligonucleotide; note = Description of Combined DNA/RNA Molecule: Synthetic oligonucleotide
  misc_difference 20: note = modified_base - a, c, t, g, unknown or other, u or 2'-deoxythymidine-3'-phosphate
  misc_difference 21: note = modified_base - a, c, t, g, unknown or other, u or 2'-deoxythymidine-3'-phosphate
tcacagccaacgactccggnn

SEQ ID NO: 394 - RNA, 21 nt, synthetic construct
  source 1..21: mol_type = other RNA; note = Description of Artificial Sequence: Synthetic oligonucleotide; note = Description of Combined DNA/RNA Molecule: Synthetic oligonucleotide
  misc_difference 20: note = modified_base - a, c, t, g, unknown or other, u or 2'-deoxythymidine-3'-phosphate
  misc_difference 21: note = modified_base - a, c, t, g, unknown or other, u or 2'-deoxythymidine-3'-phosphate
ccggagtcgttggctgtgann

SEQ ID NO: 395 - RNA, 21 nt, synthetic construct
  source 1..21: mol_type = other RNA; note = Description of Artificial Sequence: Synthetic oligonucleotide; note = Description of Combined DNA/RNA Molecule: Synthetic oligonucleotide
  misc_difference 20: note = modified_base - a, c, t, g, unknown or other, u or 2'-deoxythymidine-3'-phosphate
  misc_difference 21: note = modified_base - a, c, t, g, unknown or other, u or 2'-deoxythymidine-3'-phosphate
ccccgccgctacaccattgnn

SEQ ID NO: 396 - RNA, 21 nt, synthetic construct
  source 1..21: mol_type = other RNA; note = Description of Artificial Sequence: Synthetic oligonucleotide; note = Description of Combined DNA/RNA Molecule: Synthetic oligonucleotide
  misc_difference 20: note = modified_base - a, c, t, g, unknown or other, u or 2'-deoxythymidine-3'-phosphate
  misc_difference 21: note = modified_base - a, c, t, g, unknown or other, u or 2'-deoxythymidine-3'-phosphate
caatggtgtagcggcggggnn

SEQ ID NO: 397 - RNA, 21 nt, synthetic construct
  source 1..21: mol_type = other RNA; note = Description of Artificial Sequence: Synthetic oligonucleotide; note = Description of Combined DNA/RNA Molecule: Synthetic oligonucleotide
  misc_difference 20: note = modified_base - a, c, t, g, unknown or other, u or 2'-deoxythymidine-3'-phosphate
  misc_difference 21: note = modified_base - a, c, t, g, unknown or other, u or 2'-deoxythymidine-3'-phosphate
gaagtccactcattcttggnn

SEQ ID NO: 398 - RNA, 21 nt, synthetic construct
  source 1..21: mol_type = other RNA; note = Description of Artificial Sequence: Synthetic oligonucleotide; note = Description of Combined DNA/RNA Molecule: Synthetic oligonucleotide
  misc_difference 20: note = modified_base - a, c, t, g, unknown or other, u or 2'-deoxythymidine-3'-phosphate
  misc_difference 21: note = modified_base - a, c, t, g, unknown or other, u or 2'-deoxythymidine-3'-phosphate
ccaagaatgagtggacttcnn

SEQ ID NO: 399 - RNA, 21 nt, synthetic construct
  source 1..21: mol_type = other RNA; note = Description of Artificial Sequence: Synthetic oligonucleotide; note = Description of Combined DNA/RNA Molecule: Synthetic oligonucleotide
  misc_difference 20: note = modified_base - a, c, t, g, unknown or other, u or 2'-deoxythymidine-3'-phosphate
  misc_difference 21: note = modified_base - a, c, t, g, unknown or other, u or 2'-deoxythymidine-3'-phosphate
ccctgctgagcccctactcnn

SEQ ID NO: 400 - RNA, 21 nt, synthetic construct
  source 1..21: mol_type = other RNA; note = Description of Artificial Sequence: Synthetic oligonucleotide; note = Description of Combined DNA/RNA Molecule: Synthetic oligonucleotide
  misc_difference 20: note = modified_base - a, c, t, g, unknown or other, u or 2'-deoxythymidine-3'-phosphate
  misc_difference 21: note = modified_base - a, c, t, g, unknown or other, u or 2'-deoxythymidine-3'-phosphate
gagtaggggctcagcagggnn

SEQ ID NO: 401 - RNA, 21 nt, synthetic construct
  source 1..21: mol_type = other RNA; note = Description of Artificial Sequence: Synthetic oligonucleotide; note = Description of Combined DNA/RNA Molecule: Synthetic oligonucleotide
  misc_difference 20: note = modified_base - a, c, t, g, unknown or other, u or 2'-deoxythymidine-3'-phosphate
  misc_difference 21: note = modified_base - a, c, t, g, unknown or other, u or 2'-deoxythymidine-3'-phosphate
ctgagcccctactcctattnn

SEQ ID NO: 402 - RNA, 21 nt, synthetic construct
  source 1..21: mol_type = other RNA; note = Description of Artificial Sequence: Synthetic oligonucleotide; note = Description of Combined DNA/RNA Molecule: Synthetic oligonucleotide
  misc_difference 20: note = modified_base - a, c, t, g, unknown or other, u or 2'-deoxythymidine-3'-phosphate
  misc_difference 21: note = modified_base - a, c, t, g, unknown or other, u or 2'-deoxythymidine-3'-phosphate
aataggagtaggggctcagnn

SEQ ID NO: 403 - RNA, 21 nt, synthetic construct
  source 1..21: mol_type = other RNA; note = Description of Artificial Sequence: Synthetic oligonucleotide; note = Description of Combined DNA/RNA Molecule: Synthetic oligonucleotide
  misc_difference 20: note = modified_base - a, c, t, g, unknown or other, u or 2'-deoxythymidine-3'-phosphate
  misc_difference 21: note = modified_base - a, c, t, g, unknown or other, u or 2'-deoxythymidine-3'-phosphate
tgagcccctactcctattcnn

SEQ ID NO: 404 - RNA, 21 nt, synthetic construct
  source 1..21: mol_type = other RNA; note = Description of Artificial Sequence: Synthetic oligonucleotide; note = Description of Combined DNA/RNA Molecule: Synthetic oligonucleotide
  misc_difference 20: note = modified_base - a, c, t, g, unknown or other, u or 2'-deoxythymidine-3'-phosphate
  misc_difference 21: note = modified_base - a, c, t, g, unknown or other, u or 2'-deoxythymidine-3'-phosphate
gaataggagtaggggctcann

SEQ ID NO: 405 - RNA, 21 nt, synthetic construct
  source 1..21: mol_type = other RNA; note = Description of Artificial Sequence: Synthetic oligonucleotide; note = Description of Combined DNA/RNA Molecule: Synthetic oligonucleotide
  misc_difference 20: note = modified_base - a, c, t, g, unknown or other, u or 2'-deoxythymidine-3'-phosphate
  misc_difference 21: note = modified_base - a, c, t, g, unknown or other, u or 2'-deoxythymidine-3'-phosphate
cccctactcctattccaccnn

SEQ ID NO: 406 - RNA, 21 nt, synthetic construct
  source 1..21: mol_type = other RNA; note = Description of Artificial Sequence: Synthetic oligonucleotide; note = Description of Combined DNA/RNA Molecule: Synthetic oligonucleotide
  misc_difference 20: note = modified_base - a, c, t, g, unknown or other, u or 2'-deoxythymidine-3'-phosphate
  misc_difference 21: note = modified_base - a, c, t, g, unknown or other, u or 2'-deoxythymidine-3'-phosphate
ggtggaataggagtaggggnn

SEQ ID NO: 407 - RNA, 21 nt, synthetic construct
  source 1..21: mol_type = other RNA; note = Description of Artificial Sequence: Synthetic oligonucleotide; note = Description of Combined DNA/RNA Molecule: Synthetic oligonucleotide
  misc_difference 20: note = modified_base - a, c, t, g, unknown or other, u or 2'-deoxythymidine-3'-phosphate
  misc_difference 21: note = modified_base - a, c, t, g, unknown or other, u or 2'-deoxythymidine-3'-phosphate
ctactcctattccaccacgnn

SEQ ID NO: 408 - RNA, 21 nt, synthetic construct
  source 1..21: mol_type = other RNA; note = Description of Artificial Sequence: Synthetic oligonucleotide; note = Description of Combined DNA/RNA Molecule: Synthetic oligonucleotide
  misc_difference 20: note = modified_base - a, c, t, g, unknown or other, u or 2'-deoxythymidine-3'-phosphate
  misc_difference 21: note = modified_base - a, c, t, g, unknown or other, u or 2'-deoxythymidine-3'-phosphate
cgtggtggaataggagtagnn

SEQ ID NO: 409 - RNA, 21 nt, synthetic construct
  source 1..21: mol_type = other RNA; note = Description of Artificial Sequence: Synthetic oligonucleotide; note = Description of Combined DNA/RNA Molecule: Synthetic oligonucleotide
  misc_difference 20: note = modified_base - a, c, t, g, unknown or other, u or 2'-deoxythymidine-3'-phosphate
  misc_difference 21: note = modified_base - a, c, t, g, unknown or other, u or 2'-deoxythymidine-3'-phosphate
tactcctattccaccacggnn

SEQ ID NO: 410 - RNA, 21 nt, synthetic construct
  source 1..21: mol_type = other RNA; note = Description of Artificial Sequence: Synthetic oligonucleotide; note = Description of Combined DNA/RNA Molecule: Synthetic oligonucleotide
  misc_difference 20: note = modified_base - a, c, t, g, unknown or other, u or 2'-deoxythymidine-3'-phosphate
  misc_difference 21: note = modified_base - a, c, t, g, unknown or other, u or 2'-deoxythymidine-3'-phosphate
ccgtggtggaataggagtann

SEQ ID NO: 411 - RNA, 21 nt, synthetic construct
  source 1..21: mol_type = other RNA; note = Description of Artificial Sequence: Synthetic oligonucleotide; note = Description of Combined DNA/RNA Molecule: Synthetic oligonucleotide
  misc_difference 20: note = modified_base - a, c, t, g, unknown or other, u or 2'-deoxythymidine-3'-phosphate
  misc_difference 21: note = modified_base - a, c, t, g, unknown or other, u or 2'-deoxythymidine-3'-phosphate
actcctattccaccacggcnn

SEQ ID NO: 412 - RNA, 21 nt, synthetic construct
  source 1..21: mol_type = other RNA; note = Description of Artificial Sequence: Synthetic oligonucleotide; note = Description of Combined DNA/RNA Molecule: Synthetic oligonucleotide
  misc_difference 20: note = modified_base - a, c, t, g, unknown or other, u or 2'-deoxythymidine-3'-phosphate
  misc_difference 21: note = modified_base - a, c, t, g, unknown or other, u or 2'-deoxythymidine-3'-phosphate
gccgtggtggaataggagtnn

SEQ ID NO: 413 - RNA, 21 nt, synthetic construct
  source 1..21: mol_type = other RNA; note = Description of Artificial Sequence: Synthetic oligonucleotide; note = Description of Combined DNA/RNA Molecule: Synthetic oligonucleotide
  misc_difference 20: note = modified_base - a, c, t, g, unknown or other, u or 2'-deoxythymidine-3'-phosphate
  misc_difference 21: note = modified_base - a, c, t, g, unknown or other, u or 2'-deoxythymidine-3'-phosphate
tcctattccaccacggctgnn

SEQ ID NO: 414 - RNA, 21 nt, synthetic construct
  source 1..21: mol_type = other RNA; note = Description of Artificial Sequence: Synthetic oligonucleotide; note = Description of Combined DNA/RNA Molecule: Synthetic oligonucleotide
  misc_difference 20: note = modified_base - a, c, t, g, unknown or other, u or 2'-deoxythymidine-3'-phosphate
  misc_difference 21: note = modified_base - a, c, t, g, unknown or other, u or 2'-deoxythymidine-3'-phosphate
cagccgtggtggaataggann

SEQ ID NO: 415 - RNA, 21 nt, synthetic construct
  source 1..21: mol_type = other RNA; note = Description of Artificial Sequence: Synthetic oligonucleotide; note = Description of Combined DNA/RNA Molecule: Synthetic oligonucleotide
  misc_difference 20: note = modified_base - a, c, t, g, unknown or other, u or 2'-deoxythymidine-3'-phosphate
  misc_difference 21: note = modified_base - a, c, t, g, unknown or other, u or 2'-deoxythymidine-3'-phosphate
tattccaccacggctgtcgnn

SEQ ID NO: 416 - RNA, 21 nt, synthetic construct
  source 1..21: mol_type = other RNA; note = Description of Artificial Sequence: Synthetic oligonucleotide; note = Description of Combined DNA/RNA Molecule: Synthetic oligonucleotide
  misc_difference 20: note = modified_base - a, c, t, g, unknown or other, u or 2'-deoxythymidine-3'-phosphate
  misc_difference 21: note = modified_base - a, c, t, g, unknown or other, u or 2'-deoxythymidine-3'-phosphate
cgacagccgtggtggaatann

SEQ ID NO: 417 - RNA, 21 nt, synthetic construct
  source 1..21: mol_type = other RNA; note = Description of Artificial Sequence: Synthetic oligonucleotide; note = Description of Combined DNA/RNA Molecule: Synthetic oligonucleotide
  misc_difference 20: note = modified_base - a, c, t, g, unknown or other, u or 2'-deoxythymidine-3'-phosphate
  misc_difference 21: note = modified_base - a, c, t, g, unknown or other, u or 2'-deoxythymidine-3'-phosphate
attccaccacggctgtcgtnn

SEQ ID NO: 418 - RNA, 21 nt, synthetic construct
  source 1..21: mol_type = other RNA; note = Description of Artificial Sequence: Synthetic oligonucleotide; note = Description of Combined DNA/RNA Molecule: Synthetic oligonucleotide
  misc_difference 20: note = modified_base - a, c, t, g, unknown or other, u or 2'-deoxythymidine-3'-phosphate
  misc_difference 21: note = modified_base - a, c, t, g, unknown or other, u or 2'-deoxythymidine-3'-phosphate
acgacagccgtggtggaatnn

SEQ ID NO: 419 - RNA, 21 nt, synthetic construct
  source 1..21: mol_type = other RNA; note = Description of Artificial Sequence: Synthetic oligonucleotide; note = Description of Combined DNA/RNA Molecule: Synthetic oligonucleotide
  misc_difference 20: note = modified_base - a, c, t, g, unknown or other, u or 2'-deoxythymidine-3'-phosphate
  misc_difference 21: note = modified_base - a, c, t, g, unknown or other, u or 2'-deoxythymidine-3'-phosphate
caccacggctgtcgtcaccnn

SEQ ID NO: 420 - RNA, 21 nt, synthetic construct
  source 1..21: mol_type = other RNA; note = Description of Artificial Sequence: Synthetic oligonucleotide; note = Description of Combined DNA/RNA Molecule: Synthetic oligonucleotide
  misc_difference 20: note = modified_base - a, c, t, g, unknown or other, u or 2'-deoxythymidine-3'-phosphate
  misc_difference 21: note = modified_base - a, c, t, g, unknown or other, u or 2'-deoxythymidine-3'-phosphate
ggtgacgacagccgtggtgnn

SEQ ID NO: 421 - RNA, 21 nt, synthetic construct
  source 1..21: mol_type = other RNA; note = Description of Artificial Sequence: Synthetic oligonucleotide; note = Description of Combined DNA/RNA Molecule: Synthetic oligonucleotide
  misc_difference 20: note = modified_base - a, c, t, g, unknown or other, u or 2'-deoxythymidine-3'-phosphate
  misc_difference 21: note = modified_base - a, c, t, g, unknown or other, u or 2'-deoxythymidine-3'-phosphate
accacggctgtcgtcaccann

SEQ ID NO: 422 - RNA, 21 nt, synthetic construct
  source 1..21: mol_type = other RNA; note = Description of Artificial Sequence: Synthetic oligonucleotide; note = Description of Combined DNA/RNA Molecule: Synthetic oligonucleotide
  misc_difference 20: note = modified_base - a, c, t, g, unknown or other, u or 2'-deoxythymidine-3'-phosphate
  misc_difference 21: note = modified_base - a, c, t, g, unknown or other, u or 2'-deoxythymidine-3'-phosphate
tggtgacgacagccgtggtnn

SEQ ID NO: 423 - RNA, 21 nt, synthetic construct
  source 1..21: mol_type = other RNA; note = Description of Artificial Sequence: Synthetic oligonucleotide; note = Description of Combined DNA/RNA Molecule: Synthetic oligonucleotide
  misc_difference 20: note = modified_base - a, c, t, g, unknown or other, u or 2'-deoxythymidine-3'-phosphate
  misc_difference 21: note = modified_base - a, c, t, g, unknown or other, u or 2'-deoxythymidine-3'-phosphate
ccacggctgtcgtcaccaann

SEQ ID NO: 424 - RNA, 21 nt, synthetic construct
  source 1..21: mol_type = other RNA; note = Description of Artificial Sequence: Synthetic oligonucleotide; note = Description of Combined DNA/RNA Molecule: Synthetic oligonucleotide
  misc_difference 20: note = modified_base - a, c, t, g, unknown or other, u or 2'-deoxythymidine-3'-phosphate
  misc_difference 21: note = modified_base - a, c, t, g, unknown or other, u or 2'-deoxythymidine-3'-phosphate
ttggtgacgacagccgtggnn

SEQ ID NO: 425 - RNA, 21 nt, synthetic construct
  source 1..21: mol_type = other RNA; note = Description of Artificial Sequence: Synthetic oligonucleotide; note = Description of Combined DNA/RNA Molecule: Synthetic oligonucleotide
  misc_difference 20: note = modified_base - a, c, t, g, unknown or other, u or 2'-deoxythymidine-3'-phosphate
  misc_difference 21: note = modified_base - a, c, t, g, unknown or other, u or 2'-deoxythymidine-3'-phosphate
acggctgtcgtcaccaatcnn

SEQ ID NO: 426 - RNA, 21 nt, synthetic construct
  source 1..21: mol_type = other RNA; note = Description of Artificial Sequence: Synthetic oligonucleotide; note = Description of Combined DNA/RNA Molecule: Synthetic oligonucleotide
  misc_difference 20: note = modified_base - a, c, t, g, unknown or other, u or 2'-deoxythymidine-3'-phosphate
  misc_difference 21: note = modified_base - a, c, t, g, unknown or other, u or 2'-deoxythymidine-3'-phosphate
gattggtgacgacagccgtnn

SEQ ID NO: 427 - RNA, 21 nt, synthetic construct
  source 1..21: mol_type = other RNA; note = Description of Artificial Sequence: Synthetic oligonucleotide; note = Description of Combined DNA/RNA Molecule: Synthetic oligonucleotide
  misc_difference 20: note = modified_base - a, c, t, g, unknown or other, u or 2'-deoxythymidine-3'-phosphate
  misc_difference 21: note = modified_base - a, c, t, g, unknown or other, u or 2'-deoxythymidine-3'-phosphate
cggctgtcgtcaccaatccnn

SEQ ID NO: 428 - RNA, 21 nt, synthetic construct
  source 1..21: mol_type = other RNA; note = Description of Artificial Sequence: Synthetic oligonucleotide; note = Description of Combined DNA/RNA Molecule: Synthetic oligonucleotide
  misc_difference 20: note = modified_base - a, c, t, g, unknown or other, u or 2'-deoxythymidine-3'-phosphate
  misc_difference 21: note = modified_base - a, c, t, g, unknown or other, u or 2'-deoxythymidine-3'-phosphate
ggattggtgacgacagccgnn

SEQ ID NO: 429 - RNA, 21 nt, synthetic construct
  source 1..21: mol_type = other RNA; note = Description of Artificial Sequence: Synthetic oligonucleotide; note = Description of Combined DNA/RNA Molecule: Synthetic oligonucleotide
  misc_difference 20: note = modified_base - a, c, t, g, unknown or other, u or 2'-deoxythymidine-3'-phosphate
  misc_difference 21: note = modified_base - a, c, t, g, unknown or other, u or 2'-deoxythymidine-3'-phosphate
cgtcaccaatcccaaggaann

SEQ ID NO: 430 - RNA, 21 nt, synthetic construct
  source 1..21: mol_type = other RNA; note = Description of Artificial Sequence: Synthetic oligonucleotide; note = Description of Combined DNA/RNA Molecule: Synthetic oligonucleotide
  misc_difference 20: note = modified_base - a, c, t, g, unknown or other, u or 2'-deoxythymidine-3'-phosphate
  misc_difference 21: note = modified_base - a, c, t, g, unknown or other, u or 2'-deoxythymidine-3'-phosphate
ttccttgggattggtgacgnn

SEQ ID NO: 431 - RNA, 21 nt, synthetic construct
  source 1..21: mol_type = other RNA; note = Description of Artificial Sequence: Synthetic oligonucleotide; note = Description of Combined DNA/RNA Molecule: Synthetic oligonucleotide
  misc_difference 20: note = modified_base - a, c, t, g, unknown or other, u or 2'-deoxythymidine-3'-phosphate
  misc_difference 21: note = modified_base - a, c, t, g, unknown or other, u or 2'-deoxythymidine-3'-phosphate
caatcccaaggaatgagggnn

SEQ ID NO: 432 - RNA, 21 nt, synthetic construct
  source 1..21: mol_type = other RNA; note = Description of Artificial Sequence: Synthetic oligonucleotide; note = Description of Combined DNA/RNA Molecule: Synthetic oligonucleotide
  misc_difference 20: note = modified_base - a, c, t, g, unknown or other, u or 2'-deoxythymidine-3'-phosphate
  misc_difference 21: note = modified_base - a, c, t, g, unknown or other, u or 2'-deoxythymidine-3'-phosphate
ccctcattccttgggattgnn

SEQ ID NO: 433 - RNA, 21 nt, synthetic construct
  source 1..21: mol_type = other RNA; note = Description of Artificial Sequence: Synthetic oligonucleotide; note = Description of Combined DNA/RNA Molecule: Synthetic oligonucleotide
  misc_difference 20: note = modified_base - a, c, t, g, unknown or other, u or 2'-deoxythymidine-3'-phosphate
  misc_difference 21: note = modified_base - a, c, t, g, unknown or other, u or 2'-deoxythymidine-3'-phosphate
cctgaaggacgagggatggnn

SEQ ID NO: 434 - RNA, 21 nt, synthetic construct
  source 1..21: mol_type = other RNA; note = Description of Artificial Sequence: Synthetic oligonucleotide; note = Description of Combined DNA/RNA Molecule: Synthetic oligonucleotide
  misc_difference 20: note = modified_base - a, c, t, g, unknown or other, u or 2'-deoxythymidine-3'-phosphate
  misc_difference 21: note = modified_base - a, c, t, g, unknown or other, u or 2'-deoxythymidine-3'-phosphate
ccatccctcgtccttcaggnn

SEQ ID NO: 435 - RNA, 21 nt, synthetic construct
  source 1..21: mol_type = other RNA; note = Description of Artificial Sequence: Synthetic oligonucleotide; note = Description of Combined DNA/RNA Molecule: Synthetic oligonucleotide
  misc_difference 20: note = modified_base - a, c, t, g, unknown or other, u or 2'-deoxythymidine-3'-phosphate
  misc_difference 21: note = modified_base - a, c, t, g, unknown or other, u or 2'-deoxythymidine-3'-phosphate
ggacgagggatgggatttcnn

SEQ ID NO: 436 - RNA, 21 nt, synthetic construct
  source 1..21: mol_type = other RNA; note = Description of Artificial Sequence: Synthetic oligonucleotide; note = Description of Combined DNA/RNA Molecule: Synthetic oligonucleotide
  misc_difference 20: note = modified_base - a, c, t, g, unknown or other, u or 2'-deoxythymidine-3'-phosphate
  misc_difference 21: note = modified_base - a, c, t, g, unknown or other, u or 2'-deoxythymidine-3'-phosphate
gaaatcccatccctcgtccnn

SEQ ID NO: 437 - RNA, 21 nt, synthetic construct
  source 1..21: mol_type = other RNA; note = Description of Artificial Sequence: Synthetic oligonucleotide; note = Description of Combined DNA/RNA Molecule: Synthetic oligonucleotide
  misc_difference 20: note = modified_base - a, c, t, g, unknown or other, u or 2'-deoxythymidine-3'-phosphate
  misc_difference 21: note = modified_base - a, c, t, g, unknown or other, u or 2'-deoxythymidine-3'-phosphate
aagtccactcattcttggcnn

SEQ ID NO: 438 - RNA, 21 nt, synthetic construct
  source 1..21: mol_type = other RNA; note = Description of Artificial Sequence: Synthetic oligonucleotide; note = Description of Combined DNA/RNA Molecule: Synthetic oligonucleotide
  misc_difference 20: note = modified_base - a, c, t, g, unknown or other, u or 2'-deoxythymidine-3'-phosphate
  misc_difference 21: note = modified_base - a, c, t, g, unknown or other, u or 2'-deoxythymidine-3'-phosphate
gccaagaatgagtggacttnn

SEQ ID NO: 439 - RNA, 21 nt, synthetic construct
  source 1..21: mol_type = other RNA; note = Description of Artificial Sequence: Synthetic oligonucleotide; note = Description of Combined DNA/RNA Molecule: Synthetic oligonucleotide
  misc_difference 20: note = modified_base - a, c, t, g, unknown or other, u or 2'-deoxythymidine-3'-phosphate
  misc_difference 21: note = modified_base - a, c, t, g, unknown or other, u or 2'-deoxythymidine-3'-phosphate
gggatttcatgtaaccaagnn

SEQ ID NO: 440 - RNA, 21 nt, synthetic construct
  source 1..21: mol_type = other RNA; note = Description of Artificial Sequence: Synthetic oligonucleotide; note = Description of Combined DNA/RNA Molecule: Synthetic oligonucleotide
  misc_difference 20: note = modified_base - a, c, t, g, unknown or other, u or 2'-deoxythymidine-3'-phosphate
  misc_difference 21: note = modified_base - a, c, t, g, unknown or other, u or 2'-deoxythymidine-3'-phosphate
cttggttacatgaaatcccnn

SEQ ID NO: 441 - RNA, 21 nt, synthetic construct
  source 1..21: mol_type = other RNA; note = Description of Artificial Sequence: Synthetic oligonucleotide; note = Description of Combined DNA/RNA Molecule: Synthetic oligonucleotide
  misc_difference 20: note = modified_base - a, c, t, g, unknown or other, u or 2'-deoxythymidine-3'-phosphate
  misc_difference 21: note = modified_base - a, c, t, g, unknown or other, u or 2'-deoxythymidine-3'-phosphate
ggatttcatgtaaccaagann

SEQ ID NO: 442 - RNA, 21 nt, synthetic construct
  source 1..21: mol_type = other RNA; note = Description of Artificial Sequence: Synthetic oligonucleotide; note = Description of Combined DNA/RNA Molecule: Synthetic oligonucleotide
  misc_difference 20: note = modified_base - a, c, t, g, unknown or other, u or 2'-deoxythymidine-3'-phosphate
  misc_difference 21: note = modified_base - a, c, t, g, unknown or other, u or 2'-deoxythymidine-3'-phosphate
tcttggttacatgaaatccnn

SEQ ID NO: 443 - RNA, 21 nt, synthetic construct
  source 1..21: mol_type = other RNA; note = Description of Artificial Sequence: Synthetic oligonucleotide; note = Description of Combined DNA/RNA Molecule: Synthetic oligonucleotide
  misc_difference 20: note = modified_base - a, c, t, g, unknown or other, u or 2'-deoxythymidine-3'-phosphate
  misc_difference 21: note = modified_base - a, c, t, g, unknown or other, u or 2'-deoxythymidine-3'-phosphate
tcatgtaaccaagagtattnn

SEQ ID NO: 444 - RNA, 21 nt, synthetic construct
  source 1..21: mol_type = other RNA; note = Description of Artificial Sequence: Synthetic oligonucleotide; note = Description of Combined DNA/RNA Molecule: Synthetic oligonucleotide
  misc_difference 20: note = modified_base - a, c, t, g, unknown or other, u or 2'-deoxythymidine-3'-phosphate
  misc_difference 21: note = modified_base - a, c, t, g, unknown or other, u or 2'-deoxythymidine-3'-phosphate
aatactcttggttacatgann

SEQ ID NO: 445 - RNA, 21 nt, synthetic construct
  source 1..21: mol_type = other RNA; note = Description of Artificial Sequence: Synthetic oligonucleotide; note = Description of Combined DNA/RNA Molecule: Synthetic oligonucleotide
  misc_difference 20: note = modified_base - a, c, t, g, unknown or other, u or 2'-deoxythymidine-3'-phosphate
  misc_difference 21: note = modified_base - a, c, t, g, unknown or other, u or 2'-deoxythymidine-3'-phosphate
atgtaaccaagagtattccnn

SEQ ID NO: 446 - RNA, 21 nt, synthetic construct
  source 1..21: mol_type = other RNA; note = Description of Artificial Sequence: Synthetic oligonucleotide; note = Description of Combined DNA/RNA Molecule: Synthetic oligonucleotide
  misc_difference 20: note = modified_base - a, c, t, g, unknown or other, u or 2'-deoxythymidine-3'-phosphate
  misc_difference 21: note = modified_base - a, c, t, g, unknown or other, u or 2'-deoxythymidine-3'-phosphate
ggaatactcttggttacatnn

SEQ ID NO: 447 - RNA, 21 nt, synthetic construct
  source 1..21: mol_type = other RNA; note = Description of Artificial Sequence: Synthetic oligonucleotide; note = Description of Combined DNA/RNA Molecule: Synthetic oligonucleotide
  misc_difference 20: note = modified_base - a, c, t, g, unknown or other, u or 2'-deoxythymidine-3'-phosphate
  misc_difference 21: note = modified_base - a, c, t, g, unknown or other, u or 2'-deoxythymidine-3'-phosphate
tgtaaccaagagtattccann

SEQ ID NO: 448 - RNA, 21 nt, synthetic construct
  source 1..21: mol_type = other RNA; note = Description of Artificial Sequence: Synthetic oligonucleotide; note = Description of Combined DNA/RNA Molecule: Synthetic oligonucleotide
  misc_difference 20: note = modified_base - a, c, t, g, unknown or other, u or 2'-deoxythymidine-3'-phosphate
  misc_difference 21: note = modified_base - a, c, t, g, unknown or other, u or 2'-deoxythymidine-3'-phosphate
tggaatactcttggttacann

SEQ ID NO: 449 - RNA, 21 nt, synthetic construct
  source 1..21: mol_type = other RNA; note = Description of Artificial Sequence: Synthetic oligonucleotide; note = Description of Combined DNA/RNA Molecule: Synthetic oligonucleotide
  misc_difference 20: note = modified_base - a, c, t, g, unknown or other, u or 2'-deoxythymidine-3'-phosphate
  misc_difference 21: note = modified_base - a, c, t, g, unknown or other, u or 2'-deoxythymidine-3'-phosphate
gtaaccaagagtattccatnn

SEQ ID NO: 450 - RNA, 21 nt, synthetic construct
  source 1..21: mol_type = other RNA; note = Description of Artificial Sequence: Synthetic oligonucleotide; note = Description of Combined DNA/RNA Molecule: Synthetic oligonucleotide
  misc_difference 20: note = modified_base - a, c, t, g, unknown or other, u or 2'-deoxythymidine-3'-phosphate
  misc_difference 21: note = modified_base - a, c, t, g, unknown or other, u or 2'-deoxythymidine-3'-phosphate
atggaatactcttggttacnn

SEQ ID NO: 451 - RNA, 21 nt, synthetic construct
  source 1..21: mol_type = other RNA; note = Description of Artificial Sequence: Synthetic oligonucleotide; note = Description of Combined DNA/RNA Molecule: Synthetic oligonucleotide
  misc_difference 20: note = modified_base - a, c, t, g, unknown or other, u or 2'-deoxythymidine-3'-phosphate
  misc_difference 21: note = modified_base - a, c, t, g, unknown or other, u or 2'-deoxythymidine-3'-phosphate
tgccttgctggactggtatnn

SEQ ID NO: 452 - RNA, 21 nt, synthetic construct
  source 1..21: mol_type = other RNA; note = Description of Artificial Sequence: Synthetic oligonucleotide; note = Description of Combined DNA/RNA Molecule: Synthetic oligonucleotide
  misc_difference 20: note = modified_base - a, c, t, g, unknown or other, u or 2'-deoxythymidine-3'-phosphate
  misc_difference 21: note = modified_base - a, c, t, g, unknown or other, u or 2'-deoxythymidine-3'-phosphate
ataccagtccagcaaggcann

SEQ ID NO: 453 - RNA, 21 nt, synthetic construct
  source 1..21: mol_type = other RNA; note = Description of Artificial Sequence: Synthetic oligonucleotide; note = Description of Combined DNA/RNA Molecule: Synthetic oligonucleotide
  misc_difference 20: note = modified_base - a, c, t, g, unknown or other, u or 2'-deoxythymidine-3'-phosphate
  misc_difference 21: note = modified_base - a, c, t, g, unknown or other, u or 2'-deoxythymidine-3'-phosphate
taaagcagtgttttcacctnn

SEQ ID NO: 454 - RNA, 21 nt, synthetic construct
  source 1..21: mol_type = other RNA; note = Description of Artificial Sequence: Synthetic oligonucleotide; note = Description of Combined DNA/RNA Molecule: Synthetic oligonucleotide
  misc_difference 20: note = modified_base - a, c, t, g, unknown or other, u or 2'-deoxythymidine-3'-phosphate
  misc_difference 21: note = modified_base - a, c, t, g, unknown or other, u or 2'-deoxythymidine-3'-phosphate
aggtgaaaacactgctttann

SEQ ID NO: 455 - RNA, 21 nt, synthetic construct
  source 1..21: mol_type = other RNA; note = Description of Artificial Sequence: Synthetic oligonucleotide; note = Description of Combined DNA/RNA Molecule: Synthetic oligonucleotide
  misc_difference 20: note = modified_base - a, c, t, g, unknown or other, u or 2'-deoxythymidine-3'-phosphate
  misc_difference 21: note = modified_base - a, c, t, g, unknown or other, u or 2'-deoxythymidine-3'-phosphate
gccttgctggactggtattnn

SEQ ID NO: 456 - RNA, 21 nt, synthetic construct
  source 1..21: mol_type = other RNA; note = Description of Artificial Sequence: Synthetic oligonucleotide; note = Description of Combined DNA/RNA Molecule: Synthetic oligonucleotide
  misc_difference 20: note = modified_base - a, c, t, g, unknown or other, u or 2'-deoxythymidine-3'-phosphate
  misc_difference 21: note = modified_base - a, c, t, g, unknown or other, u or 2'-deoxythymidine-3'-phosphate
aataccagtccagcaaggcnn

SEQ ID NO: 457 - RNA, 21 nt, synthetic construct
  source 1..21: mol_type = other RNA; note = Description of Artificial Sequence: Synthetic oligonucleotide; note = Description of Combined DNA/RNA Molecule: Synthetic oligonucleotide
  misc_difference 20: note = modified_base - a, c, t, g, unknown or other, u or 2'-deoxythymidine-3'-phosphate
  misc_difference 21: note = modified_base - a, c, t, g, unknown or other, u or 2'-deoxythymidine-3'-phosphate
tgttttcacctcatatgctnn

SEQ ID NO: 458 - RNA, 21 nt, synthetic construct
  source 1..21: mol_type = other RNA; note = Description of Artificial Sequence: Synthetic oligonucleotide; note = Description of Combined DNA/RNA Molecule: Synthetic oligonucleotide
  misc_difference 20: note = modified_base - a, c, t, g, unknown or other, u or 2'-deoxythymidine-3'-phosphate
  misc_difference 21: note = modified_base - a, c, t, g, unknown or other, u or 2'-deoxythymidine-3'-phosphate
agcatatgaggtgaaaacann

SEQ ID NO: 459 - RNA, 21 nt, synthetic construct
  source 1..21: mol_type = other RNA; note = Description of Artificial Sequence: Synthetic oligonucleotide; note = Description of Combined DNA/RNA Molecule: Synthetic oligonucleotide
  misc_difference 20: note = modified_base - a, c, t, g, unknown or other, u or 2'-deoxythymidine-3'-phosphate
  misc_difference 21: note = modified_base - a, c, t, g, unknown or other, u or 2'-deoxythymidine-3'-phosphate
gttttcacctcatatgctann

SEQ ID NO: 460 - RNA, 21 nt, synthetic construct
  source 1..21: mol_type = other RNA; note = Description of Artificial Sequence: Synthetic oligonucleotide; note = Description of Combined DNA/RNA Molecule: Synthetic oligonucleotide
  misc_difference 20: note = modified_base - a, c, t, g, unknown or other, u or 2'-deoxythymidine-3'-phosphate
  misc_difference 21: note = modified_base - a, c, t, g, unknown or other, u or 2'-deoxythymidine-3'-phosphate
tagcatatgaggtgaaaacnn

SEQ ID NO: 461 - RNA, 21 nt, synthetic construct
  source 1..21: mol_type = other RNA; note = Description of Artificial Sequence: Synthetic oligonucleotide; note = Description of Combined DNA/RNA Molecule: Synthetic oligonucleotide
  misc_difference 20: note = modified_base - a, c, t, g, unknown or other, u or 2'-deoxythymidine-3'-phosphate
  misc_difference 21: note = modified_base - a, c, t, g, unknown or other, u or 2'-deoxythymidine-3'-phosphate
ttttcacctcatatgctatnn

SEQ ID NO: 462 - RNA, 21 nt, synthetic construct
  source 1..21: mol_type = other RNA; note = Description of Artificial Sequence: Synthetic oligonucleotide; note = Description of Combined DNA/RNA Molecule: Synthetic oligonucleotide
  misc_difference 20: note = modified_base - a, c, t, g, unknown or other, u or 2'-deoxythymidine-3'-phosphate
  misc_difference 21: note = modified_base - a, c, t, g, unknown or other, u or 2'-deoxythymidine-3'-phosphate
atagcatatgaggtgaaaann

SEQ ID NO: 463 - RNA, 21 nt, synthetic construct
  source 1..21: mol_type = other RNA; note = Description of Artificial Sequence: Synthetic oligonucleotide; note = Description of Combined DNA/RNA Molecule: Synthetic oligonucleotide
  misc_difference 20: note = modified_base - a, c, t, g, unknown or other, u or 2'-deoxythymidine-3'-phosphate
  misc_difference 21: note = modified_base - a, c, t, g, unknown or other, u or 2'-deoxythymidine-3'-phosphate
ttcacctcatatgctatgtnn

SEQ ID NO: 464 - RNA, 21 nt, synthetic construct
  source 1..21: mol_type = other RNA; note = Description of Artificial Sequence: Synthetic oligonucleotide; note = Description of Combined DNA/RNA Molecule: Synthetic oligonucleotide
  misc_difference 20: note = modified_base - a, c, t, g, unknown or other, u or 2'-deoxythymidine-3'-phosphate
  misc_difference 21: note = modified_base - a, c, t, g, unknown or other, u or 2'-deoxythymidine-3'-phosphate
acatagcatatgaggtgaann

SEQ ID NO: 465 - RNA, 21 nt, synthetic construct
  source 1..21: mol_type = other RNA; note = Description of Artificial Sequence: Synthetic oligonucleotide; note = Description of Combined DNA/RNA Molecule: Synthetic oligonucleotide
  misc_difference 20: note = modified_base - a, c, t, g, unknown or other, u or 2'-deoxythymidine-3'-phosphate
  misc_difference 21: note = modified_base - a, c, t, g, unknown or other, u or 2'-deoxythymidine-3'-phosphate
cacctcatatgctatgttann

SEQ ID NO: 466 - RNA, 21 nt, synthetic construct
  source 1..21: mol_type = other RNA; note = Description of Artificial Sequence: Synthetic oligonucleotide; note = Description of Combined DNA/RNA Molecule: Synthetic oligonucleotide
  misc_difference 20: note = modified_base - a, c, t, g, unknown or other, u or 2'-deoxythymidine-3'-phosphate
  misc_difference 21: note = modified_base - a, c, t, g, unknown or other, u or 2'-deoxythymidine-3'-phosphate
taacatagcatatgaggtgnn

SEQ ID NO: 467 - RNA, 21 nt, synthetic construct
  source 1..21: mol_type = other RNA; note = Description of Artificial Sequence: Synthetic oligonucleotide; note = Description of Combined DNA/RNA Molecule: Synthetic oligonucleotide
  misc_difference 20: note = modified_base - a, c, t, g, unknown or other, u or 2'-deoxythymidine-3'-phosphate
  misc_difference 21: note = modified_base - a, c, t, g, unknown or other, u or 2'-deoxythymidine-3'-phosphate
ccttgctggactggtatttnn

SEQ ID NO: 468 - RNA, 21 nt, synthetic construct
  source 1..21: mol_type = other RNA; note = Description of Artificial Sequence: Synthetic oligonucleotide; note = Description of Combined DNA/RNA Molecule: Synthetic oligonucleotide
  misc_difference 20: note = modified_base - a, c, t, g, unknown or other, u or 2'-deoxythymidine-3'-phosphate
  misc_difference 21: note = modified_base - a, c, t, g, unknown or other, u or 2'-deoxythymidine-3'-phosphate
aaataccagtccagcaaggnn

SEQ ID NO: 469 - RNA, 21 nt, synthetic construct
  source 1..21: mol_type = other RNA; note = Description of Artificial Sequence: Synthetic oligonucleotide; note = Description of Combined DNA/RNA Molecule: Synthetic oligonucleotide
  misc_difference 20: note = modified_base - a, c, t, g, unknown or other, u or 2'-deoxythymidine-3'-phosphate
  misc_difference 21: note = modified_base - a, c, t, g, unknown or other, u or 2'-deoxythymidine-3'-phosphate
atatgctatgttagaagtcnn

SEQ ID NO: 470 - RNA, 21 nt, synthetic construct
  source 1..21: mol_type = other RNA; note = Description of Artificial Sequence: Synthetic oligonucleotide; note = Description of Combined DNA/RNA Molecule: Synthetic oligonucleotide
  misc_difference 20: note = modified_base - a, c, t, g, unknown or other, u or 2'-deoxythymidine-3'-phosphate
  misc_difference 21: note = modified_base - a, c, t, g, unknown or other, u or 2'-deoxythymidine-3'-phosphate
gacttctaacatagcatatnn

SEQ ID NO: 471 - RNA, 21 nt, synthetic construct
  source 1..21: mol_type = other RNA; note = Description of Artificial Sequence: Synthetic oligonucleotide; note = Description of Combined DNA/RNA Molecule: Synthetic oligonucleotide
  misc_difference 20: note = modified_base - a, c, t, g, unknown or other, u or 2'-deoxythymidine-3'-phosphate
  misc_difference 21: note = modified_base - a, c, t, g, unknown or other, u or 2'-deoxythymidine-3'-phosphate
tatgctatgttagaagtccnn

SEQ ID NO: 472 - RNA, 21 nt, synthetic construct
  source 1..21: mol_type = other RNA; note = Description of Artificial Sequence: Synthetic oligonucleotide; note = Description of Combined DNA/RNA Molecule: Synthetic oligonucleotide
  misc_difference 20: note = modified_base - a, c, t, g, unknown or other, u or 2'-deoxythymidine-3'-phosphate
  misc_difference 21: note = modified_base - a, c, t, g, unknown or other, u or 2'-deoxythymidine-3'-phosphate
ggacttctaacatagcatann

SEQ ID NO: 473 - RNA, 21 nt, synthetic construct
  source 1..21: mol_type = other RNA; note = Description of Artificial Sequence: Synthetic oligonucleotide; note = Description of Combined DNA/RNA Molecule: Synthetic oligonucleotide
  misc_difference 20: note = modified_base - a, c, t, g, unknown or other, u or 2'-deoxythymidine-3'-phosphate
  misc_difference 21: note = modified_base - a, c, t, g, unknown or other, u or 2'-deoxythymidine-3'-phosphate
tgctatgttagaagtccagnn

SEQ ID NO: 474 - RNA, 21 nt, synthetic construct
  source 1..21: mol_type = other RNA; note = Description of Artificial Sequence: Synthetic oligonucleotide; note = Description of Combined DNA/RNA Molecule: Synthetic oligonucleotide
  misc_difference 20: note = modified_base - a, c, t, g, unknown or other, u or 2'-deoxythymidine-3'-phosphate
  misc_difference 21: note = modified_base - a, c, t, g, unknown or other, u or 2'-deoxythymidine-3'-phosphate
ctggacttctaacatagcann

SEQ ID NO: 475 - RNA, 21 nt, synthetic construct
  source 1..21: mol_type = other RNA; note = Description of Artificial Sequence: Synthetic oligonucleotide; note = Description of Combined DNA/RNA Molecule: Synthetic oligonucleotide
  misc_difference 20: note = modified_base - a, c, t, g, unknown or other, u or 2'-deoxythymidine-3'-phosphate
  misc_difference 21: note = modified_base - a, c, t, g, unknown or other, u or 2'-deoxythymidine-3'-phosphate
cttgctggactggtatttgnn

SEQ ID NO: 476 - RNA, 21 nt, synthetic construct
  source 1..21: mol_type = other RNA; note = Description of Artificial Sequence: Synthetic oligonucleotide; note = Description of Combined DNA/RNA Molecule: Synthetic oligonucleotide
  misc_difference 20: note = modified_base - a, c, t, g, unknown or other, u or 2'-deoxythymidine-3'-phosphate
  misc_difference 21: note = modified_base - a, c, t, g, unknown or other, u or 2'-deoxythymidine-3'-phosphate
caaataccagtccagcaagnn

SEQ ID NO: 477 - RNA, 21 nt, synthetic construct
  source 1..21: mol_type = other RNA; note = Description of Artificial Sequence: Synthetic oligonucleotide; note = Description of Combined DNA/RNA Molecule: Synthetic oligonucleotide
  misc_difference 20: note = modified_base - a, c, t, g, unknown or other, u or 2'-deoxythymidine-3'-phosphate
  misc_difference 21: note = modified_base - a, c, t, g, unknown or other, u or 2'-deoxythymidine-3'-phosphate
agtccaggcagagacaatann

SEQ ID NO: 478 - DNA, 22 bp, synthetic construct
  source 1..22: mol_type = other DNA; note = Description of Artificial Sequence: Synthetic oligonucleotide; note = Description of Combined DNA/RNA Molecule: Synthetic oligonucleotide
  misc_difference 21: note = modified_base - a, c, t, g, unknown or other, u or 2'-deoxythymidine-3'-phosphate
  misc_difference 22: note = modified_base - a, c, t, g, unknown or other, u or 2'-deoxythymidine-3'-phosphate
  misc_feature 1..18: note = RNA
  misc_feature 19..20: note = DNA
  misc_feature 21..22: note = RNA
attgtctctgcctggactttnn

SEQ ID NO: 479 - RNA, 21 nt, synthetic construct
  source 1..21: mol_type = other RNA; note = Description of Artificial Sequence: Synthetic oligonucleotide; note = Description of Combined DNA/RNA Molecule: Synthetic oligonucleotide
  misc_difference 20: note = modified_base - a, c, t, g, unknown or other, u or 2'-deoxythymidine-3'-phosphate
  misc_difference 21: note = modified_base - a, c, t, g, unknown or other, u or 2'-deoxythymidine-3'-phosphate
tccaggcagagacaataaann

SEQ ID NO: 480 - RNA, 21 nt, synthetic construct
  source 1..21: mol_type = other RNA; note = Description of Artificial Sequence: Synthetic oligonucleotide; note = Description of Combined DNA/RNA Molecule: Synthetic oligonucleotide
  misc_difference 20: note = modified_base - a, c, t, g, unknown or other, u or 2'-deoxythymidine-3'-phosphate
  misc_difference 21: note = modified_base - a, c, t, g, unknown or other, u or 2'-deoxythymidine-3'-phosphate
tttattgtctctgcctggann

SEQ ID NO: 481 - RNA, 21 nt, synthetic construct
  source 1..21: mol_type = other RNA; note = Description of Artificial Sequence: Synthetic oligonucleotide; note = Description of Combined DNA/RNA Molecule: Synthetic oligonucleotide
  misc_difference 20: note = modified_base - a, c, t, g, unknown or other, u or 2'-deoxythymidine-3'-phosphate
  misc_difference 21: note = modified_base - a, c, t, g, unknown or other, u or 2'-deoxythymidine-3'-phosphate
gtgaaaggcacttttcattnn

SEQ ID NO: 482 - RNA, 21 nt, synthetic construct
  source 1..21: mol_type = other RNA; note = Description of Artificial Sequence: Synthetic oligonucleotide; note = Description of Combined DNA/RNA Molecule: Synthetic oligonucleotide
  misc_difference 20: note = modified_base - a, c, t, g, unknown or other, u or 2'-deoxythymidine-3'-phosphate
  misc_difference 21: note = modified_base - a, c, t, g, unknown or other, u or 2'-deoxythymidine-3'-phosphate
aatgaaaagtgcctttcacnn

SEQ ID NO: 483 - RNA, 21 nt, synthetic construct
  source 1..21: mol_type = other RNA; note = Description of Artificial Sequence: Synthetic oligonucleotide; note = Description of Combined DNA/RNA Molecule: Synthetic oligonucleotide
  misc_difference 20: note = modified_base - a, c, t, g, unknown or other, u or 2'-deoxythymidine-3'-phosphate
  misc_difference 21: note = modified_base - a, c, t, g, unknown or other, u or 2'-deoxythymidine-3'-phosphate
tggactggtatttgtgtctnn

SEQ ID NO: 484 - RNA, 21 nt, synthetic construct
  source 1..21: mol_type = other RNA; note = Description of Artificial Sequence: Synthetic oligonucleotide; note = Description of Combined DNA/RNA Molecule: Synthetic oligonucleotide
  misc_difference 20: note = modified_base - a, c, t, g, unknown or other, u or 2'-deoxythymidine-3'-phosphate
  misc_difference 21: note = modified_base - a, c, t, g, unknown or other, u or 2'-deoxythymidine-3'-phosphate
agacacaaataccagtccann

SEQ ID NO: 485 - RNA, 21 nt, synthetic construct
  source 1..21: mol_type = other RNA; note = Description of Artificial Sequence: Synthetic oligonucleotide; note = Description of Combined DNA/RNA Molecule: Synthetic oligonucleotide
  misc_difference 20: note = modified_base - a, c, t, g, unknown or other, u or 2'-deoxythymidine-3'-phosphate
  misc_difference 21: note = modified_base - a, c, t, g, unknown or other, u or 2'-deoxythymidine-3'-phosphate
gtctgaggctggccctacgnn

SEQ ID NO: 486 - RNA, 21 nt, synthetic construct
  source 1..21: mol_type = other RNA; note = Description of Artificial Sequence: Synthetic oligonucleotide; note = Description of Combined DNA/RNA Molecule: Synthetic oligonucleotide
  misc_difference 20: note = modified_base - a, c, t, g, unknown or other, u or 2'-deoxythymidine-3'-phosphate
  misc_difference 21: note = modified_base - a, c, t, g, unknown or other, u or 2'-deoxythymidine-3'-phosphate
cgtagggccagcctcagacnn

SEQ ID NO: 487 - RNA, 21 nt, synthetic construct
  source 1..21: mol_type = other RNA; note = Description of Artificial Sequence: Synthetic oligonucleotide; note = Description of Combined DNA/RNA Molecule: Synthetic oligonucleotide
  misc_difference 20: note = modified_base - a, c, t, g, unknown or other, u or 2'-deoxythymidine-3'-phosphate
  misc_difference 21: note = modified_base - a, c, t, g, unknown or other, u or 2'-deoxythymidine-3'-phosphate
ctgaggctggccctacgggnn

SEQ ID NO: 488 - RNA, 21 nt, synthetic construct
  source 1..21: mol_type = other RNA; note = Description of Artificial Sequence: Synthetic oligonucleotide; note = Description of Combined DNA/RNA Molecule: Synthetic oligonucleotide
  misc_difference 20: note = modified_base - a, c, t, g, unknown or other, u or 2'-deoxythymidine-3'-phosphate
  misc_difference 21: note = modified_base - a, c, t, g, unknown or other, u or 2'-deoxythymidine-3'-phosphate
cccgtagggccagcctcagnn

SEQ ID NO: 489 - RNA, 21 nt, synthetic construct
  source 1..21: mol_type = other RNA; note = Description of Artificial Sequence: Synthetic oligonucleotide; note = Description of Combined DNA/RNA Molecule: Synthetic oligonucleotide
  misc_difference 20: note = modified_base - a, c, t, g, unknown or other, u or 2'-deoxythymidine-3'-phosphate
  misc_difference 21: note = modified_base - a, c, t, g, unknown or other, u or 2'-deoxythymidine-3'-phosphate
gaggctggccctacgggcann

SEQ ID NO: 490 - RNA, 21 nt, synthetic construct
  source 1..21: mol_type = other RNA; note = Description of Artificial Sequence: Synthetic oligonucleotide; note = Description of Combined DNA/RNA Molecule: Synthetic oligonucleotide
  misc_difference 20: note = modified_base - a, c, t, g, unknown or other, u or 2'-deoxythymidine-3'-phosphate
  misc_difference 21: note = modified_base - a, c, t, g, unknown or other, u or 2'-deoxythymidine-3'-phosphate
tgcccgtagggccagcctcnn

SEQ ID NO: 491 - RNA, 21 nt, synthetic construct
  source 1..21: mol_type = other RNA; note = Description of Artificial Sequence: Synthetic oligonucleotide; note = Description of Combined DNA/RNA Molecule: Synthetic oligonucleotide
  misc_difference 20: note = modified_base - a, c, t, g, unknown or other, u or 2'-deoxythymidine-3'-phosphate
  misc_difference 21: note = modified_base - a, c, t, g, unknown or other, u or 2'-deoxythymidine-3'-phosphate
aggctggccctacgggcacnn

SEQ ID NO: 492 - RNA, 21 nt, synthetic construct
  source 1..21: mol_type = other RNA; note = Description of Artificial Sequence: Synthetic oligonucleotide; note = Description of Combined DNA/RNA Molecule: Synthetic oligonucleotide
  misc_difference 20: note = modified_base - a, c, t, g, unknown or other, u or 2'-deoxythymidine-3'-phosphate
  misc_difference 21: note = modified_base - a, c, t, g, unknown or other, u or 2'-deoxythymidine-3'-phosphate
gtgcccgtagggccagcctnn

SEQ ID NO: 493 - RNA, 21 nt, synthetic construct
  source 1..21: mol_type = other RNA; note = Description of Artificial Sequence: Synthetic oligonucleotide; note = Description of Combined DNA/RNA Molecule: Synthetic oligonucleotide
  misc_difference 20: note = modified_base - a, c, t, g, unknown or other, u or 2'-deoxythymidine-3'-phosphate
  misc_difference 21: note = modified_base - a, c, t, g, unknown or other, u or 2'-deoxythymidine-3'-phosphate
gctggccctacgggcaccgnn

SEQ ID NO: 494 - RNA, 21 nt, synthetic construct
  source 1..21: mol_type = other RNA; note = Description of Artificial Sequence: Synthetic oligonucleotide; note = Description of Combined DNA/RNA Molecule: Synthetic oligonucleotide
  misc_difference 20: note = modified_base - a, c, t, g, unknown or other, u or 2'-deoxythymidine-3'-phosphate
  misc_difference 21: note = modified_base - a, c, t, g, unknown or other, u or 2'-deoxythymidine-3'-phosphate
cggtgcccgtagggccagcnn

SEQ ID NO: 495 - RNA, 21 nt, synthetic construct
  source 1..21: mol_type = other RNA; note = Description of Artificial Sequence: Synthetic oligonucleotide; note = Description of Combined DNA/RNA Molecule: Synthetic oligonucleotide
  misc_difference 20: note = modified_base - a, c, t, g, unknown or other, u or 2'-deoxythymidine-3'-phosphate
  misc_difference 21: note = modified_base - a, c, t, g, unknown or other, u or 2'-deoxythymidine-3'-phosphate
ctggccctacgggcaccggnn

SEQ ID NO: 496 - RNA, 21 nt, synthetic construct
  source 1..21: mol_type = other RNA; note = Description of Artificial Sequence: Synthetic oligonucleotide; note = Description of Combined DNA/RNA Molecule: Synthetic oligonucleotide
  misc_difference 20: note = modified_base - a, c, t, g, unknown or other, u or 2'-deoxythymidine-3'-phosphate
  misc_difference 21: note = modified_base - a, c, t, g, unknown or other, u or 2'-deoxythymidine-3'-phosphate
ccggtgcccgtagggccagnn

SEQ ID NO: 497 - RNA, 21 nt, synthetic construct
  source 1..21: mol_type = other RNA; note = Description of Artificial Sequence: Synthetic oligonucleotide; note = Description of Combined DNA/RNA Molecule: Synthetic oligonucleotide
  misc_difference 20: note = modified_base - a, c, t, g, unknown or other, u or 2'-deoxythymidine-3'-phosphate
  misc_difference 21: note = modified_base - a, c, t, g, unknown or other, u or 2'-deoxythymidine-3'-phosphate
ggccctacgggcaccggtgnn

SEQ ID NO: 498 - RNA, 21 nt, synthetic construct
  source 1..21: mol_type = other RNA; note = Description of Artificial Sequence: Synthetic oligonucleotide; note = Description of Combined DNA/RNA Molecule: Synthetic oligonucleotide
  misc_difference 20: note = modified_base - a, c, t, g, unknown or other, u or 2'-deoxythymidine-3'-phosphate
  misc_difference 21: note = modified_base - a, c, t, g, unknown or other, u or 2'-deoxythymidine-3'-phosphate
caccggtgcccgtagggccnn

SEQ ID NO: 499 - RNA, 21 nt, synthetic construct
  source 1..21: mol_type = other RNA; note = Description of Artificial Sequence: Synthetic oligonucleotide; note = Description of Combined DNA/RNA Molecule: Synthetic oligonucleotide
  misc_difference 20: note = modified_base - a, c, t, g, unknown or other, u or 2'-deoxythymidine-3'-phosphate
  misc_difference 21: note = modified_base - a, c, t, g, unknown or other, u or 2'-deoxythymidine-3'-phosphate
ccactcattcttggcaggann

SEQ ID NO: 500 - RNA, 21 nt, synthetic construct
  source 1..21: mol_type = other RNA; note = Description of Artificial Sequence: Synthetic oligonucleotide; note = Description of Combined DNA/RNA Molecule: Synthetic oligonucleotide
  misc_difference 20: note = modified_base - a, c, t, g, unknown or other, u or 2'-deoxythymidine-3'-phosphate
  misc_difference 21: note = modified_base - a, c, t, g, unknown or other, u or 2'-deoxythymidine-3'-phosphate
tcctgccaagaatgagtggnn

SEQ ID NO: 501 - RNA, 21 nt, synthetic construct
  source 1..21: mol_type = other RNA; note = Description of Artificial Sequence: Synthetic oligonucleotide; note = Description of Combined DNA/RNA Molecule: Synthetic oligonucleotide
  misc_difference 20: note = modified_base - a, c, t, g, unknown or other, u or 2'-deoxythymidine-3'-phosphate
  misc_difference 21: note = modified_base - a, c, t, g, unknown or other, u or 2'-deoxythymidine-3'-phosphate
cctacgggcaccggtgaatnn

SEQ ID NO: 502 - RNA, 21 nt, synthetic construct
  source 1..21: mol_type = other RNA; note = Description of Artificial Sequence: Synthetic oligonucleotide; note = Description of Combined DNA/RNA Molecule: Synthetic oligonucleotide
  misc_difference 20: note = modified_base - a, c, t, g, unknown or other, u or 2'-deoxythymidine-3'-phosphate
  misc_difference 21: note = modified_base - a, c, t, g, unknown or other, u or 2'-deoxythymidine-3'-phosphate
attcaccggtgcccgtaggnn

SEQ ID NO: 503 - RNA, 21 nt, synthetic construct
  source 1..21: mol_type = other RNA; note = Description of Artificial Sequence: Synthetic oligonucleotide; note = Description of Combined DNA/RNA Molecule: Synthetic oligonucleotide
  misc_difference 20: note = modified_base - a, c, t, g, unknown or other, u or 2'-deoxythymidine-3'-phosphate
  misc_difference 21: note = modified_base - a, c, t, g, unknown or other, u or 2'-deoxythymidine-3'-phosphate
ctacgggcaccggtgaatcnn

SEQ ID NO: 504 - RNA, 21 nt, synthetic construct
  source 1..21: mol_type = other RNA; note = Description of Artificial Sequence: Synthetic oligonucleotide; note = Description of Combined DNA/RNA Molecule: Synthetic oligonucleotide
  misc_difference 20: note = modified_base - a, c, t, g, unknown or other, u or 2'-deoxythymidine-3'-phosphate
  misc_difference 21: note = modified_base - a, c, t, g, unknown or other, u or 2'-deoxythymidine-3'-phosphate
gattcaccggtgcccgtagnn

SEQ ID NO: 505 - RNA, 21 nt, synthetic construct
  source 1..21: mol_type = other RNA; note = Description of Artificial Sequence: Synthetic oligonucleotide; note = Description of Combined DNA/RNA Molecule: Synthetic oligonucleotide
  misc_difference 20: note = modified_base - a, c, t, g, unknown or other, u or 2'-deoxythymidine-3'-phosphate
  misc_difference 21: note = modified_base - a, c, t, g, unknown or other, u or 2'-deoxythymidine-3'-phosphate
tacgggcaccggtgaatccnn

SEQ ID NO: 506 - RNA, 21 nt, synthetic construct
  source 1..21: mol_type = other RNA; note = Description of Artificial Sequence: Synthetic oligonucleotide; note = Description of Combined DNA/RNA Molecule: Synthetic oligonucleotide
  misc_difference 20: note = modified_base - a, c, t, g, unknown or other, u or 2'-deoxythymidine-3'-phosphate
  misc_difference 21: note = modified_base - a, c, t, g, unknown or other, u or 2'-deoxythymidine-3'-phosphate
ggattcaccggtgcccgtann

SEQ ID NO: 507 - RNA, 21 nt, synthetic construct
  source 1..21: mol_type = other RNA; note = Description of Artificial Sequence: Synthetic oligonucleotide; note = Description of Combined DNA/RNA Molecule: Synthetic oligonucleotide
  misc_difference 20: note = modified_base - a, c, t, g, unknown or other, u or 2'-deoxythymidine-3'-phosphate
  misc_difference 21: note = modified_base - a, c, t, g, unknown or other, u or 2'-deoxythymidine-3'-phosphate
acgggcaccggtgaatccann

SEQ ID NO: 508 - RNA, 21 nt, synthetic construct
  source 1..21: mol_type = other RNA; note = Description of Artificial Sequence: Synthetic oligonucleotide; note = Description of Combined DNA/RNA Molecule: Synthetic oligonucleotide
  misc_difference 20: note = modified_base - a, c, t, g, unknown or other, u or 2'-deoxythymidine-3'-phosphate
  misc_difference 21: note = modified_base - a, c, t, g, unknown or other, u or 2'-deoxythymidine-3'-phosphate
tggattcaccggtgcccgtnn

SEQ ID NO: 509 - RNA, 21 nt, synthetic construct
  source 1..21: mol_type = other RNA; note = Description of Artificial Sequence: Synthetic oligonucleotide; note = Description of Combined DNA/RNA Molecule: Synthetic oligonucleotide
  misc_difference 20: note = modified_base - a, c, t, g, unknown or other, u or 2'-deoxythymidine-3'-phosphate
  misc_difference 21: note = modified_base - a, c, t, g, unknown or other, u or 2'-deoxythymidine-3'-phosphate
gcaccggtgaatccaagtgnn

SEQ ID NO: 510 - RNA, 21 nt, synthetic construct
  source 1..21: mol_type = other RNA; note = Description of Artificial Sequence: Synthetic oligonucleotide; note = Description of Combined DNA/RNA Molecule: Synthetic oligonucleotide
  misc_difference 20: note = modified_base - a, c, t, g, unknown or other, u or 2'-deoxythymidine-3'-phosphate
  misc_difference 21: note = modified_base - a, c, t, g, unknown or other, u or 2'-deoxythymidine-3'-phosphate
cacttggattcaccggtgcnn

SEQ ID NO: 511 - RNA, 21 nt, synthetic construct
  source 1..21: mol_type = other RNA; note = Description of Artificial Sequence: Synthetic oligonucleotide; note = Description of Combined DNA/RNA Molecule: Synthetic oligonucleotide
  misc_difference 20: note = modified_base - a, c, t, g, unknown or other, u or 2'-deoxythymidine-3'-phosphate
  misc_difference 21: note = modified_base - a, c, t, g, unknown or other, u or 2'-deoxythymidine-3'-phosphate
caccggtgaatccaagtgtnn

SEQ ID NO: 512 - RNA, 21 nt, synthetic construct
  source 1..21: mol_type = other RNA; note = Description of Artificial Sequence: Synthetic oligonucleotide; note = Description of Combined DNA/RNA Molecule: Synthetic oligonucleotide
  misc_difference 20: note = modified_base - a, c, t, g, unknown or other, u or 2'-deoxythymidine-3'-phosphate
  misc_difference 21: note = modified_base - a, c, t, g, unknown or other, u or 2'-deoxythymidine-3'-phosphate
acacttggattcaccggtgnn

SEQ ID NO: 513 - RNA, 21 nt, synthetic construct
  source 1..21: mol_type = other RNA; note = Description of Artificial Sequence: Synthetic oligonucleotide; note = Description of Combined DNA/RNA Molecule: Synthetic oligonucleotide
  misc_difference 20: note = modified_base - a, c, t, g, unknown or other, u or 2'-deoxythymidine-3'-phosphate
  misc_difference 21: note = modified_base - a, c, t, g, unknown or other, u or 2'-deoxythymidine-3'-phosphate
tgtggccatgcatgtgttcnn

SEQ ID NO: 514 - RNA, 21 nt, synthetic construct
  source 1..21: mol_type = other RNA; note = Description of Artificial Sequence: Synthetic oligonucleotide; note = Description of Combined DNA/RNA Molecule: Synthetic oligonucleotide
  misc_difference 20: note = modified_base - a, c, t, g, unknown or other, u or 2'-deoxythymidine-3'-phosphate
  misc_difference 21: note = modified_base - a, c, t, g, unknown or other, u or 2'-deoxythymidine-3'-phosphate
gaacacatgcatggccacann

SEQ ID NO: 515 - RNA, 21 nt, synthetic construct
  source 1..21: mol_type = other RNA; note = Description of Artificial Sequence: Synthetic oligonucleotide; note = Description of Combined DNA/RNA Molecule: Synthetic oligonucleotide
  misc_difference 20: note = modified_base - a, c, t, g, unknown or other, u or 2'-deoxythymidine-3'-phosphate
  misc_difference 21: note = modified_base - a, c, t, g, unknown or other, u or 2'-deoxythymidine-3'-phosphate
gtggccatgcatgtgttcann

SEQ ID NO: 516 - RNA, 21 nt, synthetic construct
  source 1..21: mol_type = other RNA; note = Description of Artificial Sequence: Synthetic oligonucleotide; note = Description of Combined DNA/RNA Molecule: Synthetic oligonucleotide
  misc_difference 20: note = modified_base - a, c, t, g, unknown or other, u or 2'-deoxythymidine-3'-phosphate
  misc_difference 21: note = modified_base - a, c, t, g, unknown or other, u or 2'-deoxythymidine-3'-phosphate
tgaacacatgcatggccacnn

SEQ ID NO: 517 - RNA, 21 nt, synthetic construct
  source 1..21: mol_type = other RNA; note = Description of Artificial Sequence: Synthetic oligonucleotide; note = Description of Combined DNA/RNA Molecule: Synthetic oligonucleotide
  misc_difference 20: note = modified_base - a, c, t, g, unknown or other, u or 2'-deoxythymidine-3'-phosphate
  misc_difference 21: note = modified_base - a, c, t, g, unknown or other, u or 2'-deoxythymidine-3'-phosphate
gccatgcatgtgttcagaann

SEQ ID NO: 518 - RNA, 21 nt, synthetic construct
  source 1..21: mol_type = other RNA; note = Description of Artificial Sequence: Synthetic oligonucleotide; note = Description of Combined DNA/RNA Molecule: Synthetic oligonucleotide
  misc_difference 20: note = modified_base - a, c, t, g, unknown or other, u or 2'-deoxythymidine-3'-phosphate
  misc_difference 21: note = modified_base - a, c, t, g, unknown or other, u or 2'-deoxythymidine-3'-phosphate
ttctgaacacatgcatggcnn

SEQ ID NO: 519 - RNA, 21 nt, synthetic construct
  source 1..21: mol_type = other RNA; note = Description of Artificial Sequence: Synthetic oligonucleotide; note = Description of Combined DNA/RNA Molecule: Synthetic oligonucleotide
  misc_difference 20: note = modified_base - a, c, t, g, unknown or other, u or 2'-deoxythymidine-3'-phosphate
  misc_difference 21: note = modified_base - a, c, t, g, unknown or other, u or 2'-deoxythymidine-3'-phosphate
tattccaccacggctgtcann

SEQ ID NO: 520 - RNA, 21 nt, synthetic construct
  source 1..21: mol_type = other RNA; note = Description of Artificial Sequence: Synthetic oligonucleotide; note = Description of Combined DNA/RNA Molecule: Synthetic oligonucleotide
  misc_difference 20: note = modified_base - a, c, t, g, unknown or other, u or 2'-deoxythymidine-3'-phosphate
  misc_difference 21: note = modified_base - a, c, t, g, unknown or other, u or 2'-deoxythymidine-3'-phosphate
tgacagccgtggtggaatann

SEQ ID NO: 521 - RNA, 21 nt, synthetic construct
  source 1..21: mol_type = other RNA; note = Description of Artificial Sequence: Synthetic oligonucleotide; note = Description of Combined DNA/RNA Molecule: Synthetic oligonucleotide
  misc_difference 20: note = modified_base - a, c, t, g, unknown or other, u or 2'-deoxythymidine-3'-phosphate
  misc_difference 21: note = modified_base - a, c, t, g, unknown or other, u or 2'-deoxythymidine-3'-phosphate
gtcatcaccaatcccaaggnn

SEQ ID NO: 522 - RNA, 21 nt, synthetic construct
  source 1..21: mol_type = other RNA; note = Description of Artificial Sequence: Synthetic oligonucleotide; note = Description of Combined DNA/RNA Molecule: Synthetic oligonucleotide
  misc_difference 20: note = modified_base - a, c, t, g, unknown or other, u or 2'-deoxythymidine-3'-phosphate
  misc_difference 21: note = modified_base - a, c, t, g, unknown or other, u or 2'-deoxythymidine-3'-phosphate
ccttgggattggtgatgacnn

SEQ ID NO: 523 - RNA, 21 nt, synthetic construct
  source 1..21: mol_type = other RNA; note = Description of Artificial Sequence: Synthetic oligonucleotide; note = Description of Combined DNA/RNA Molecule: Synthetic oligonucleotide
  misc_difference 20: note = modified_base - a, c, t, g, unknown or other, u or 2'-deoxythymidine-3'-phosphate
  misc_difference 21: note = modified_base - a, c, t, g, unknown or other, u or 2'-deoxythymidine-3'-phosphate
gtcctctgatggtcaaagtnn

SEQ ID NO: 524 - RNA, 21 nt, synthetic construct
  source 1..21: mol_type = other RNA; note = Description of Artificial Sequence: Synthetic oligonucleotide; note = Description of Combined DNA/RNA Molecule: Synthetic oligonucleotide
  misc_difference 20: note = modified_base - a, c, t, g, unknown or other, u or 2'-deoxythymidine-3'-phosphate
  misc_difference 21: note = modified_base - a, c, t, g, unknown or other, u or 2'-deoxythymidine-3'-phosphate
actttgaccatcagaggacnn

SEQ ID NO: 525 - RNA, 21 nt, synthetic construct
  source 1..21: mol_type = other RNA; note = Description of Artificial Sequence: Synthetic oligonucleotide; note = Description of Combined DNA/RNA Molecule: Synthetic oligonucleotide
  misc_difference 20: note = modified_base - a, c, t, g, unknown or other, u or 2'-deoxythymidine-3'-phosphate
  misc_difference 21: note = modified_base - a, c, t, g, unknown or other, u or 2'-deoxythymidine-3'-phosphate
gatggtcaaagttctagatnn

SEQ ID NO: 526 - RNA, 21 nt, synthetic construct
  source 1..21: mol_type = other RNA; note = Description of Artificial Sequence: Synthetic oligonucleotide; note = Description of Combined DNA/RNA Molecule: Synthetic oligonucleotide
  misc_difference 20: note = modified_base - a, c, t, g, unknown or other, u or 2'-deoxythymidine-3'-phosphate
  misc_difference 21: note = modified_base - a, c, t, g, unknown or other, u or 2'-deoxythymidine-3'-phosphate
atctagaactttgaccatcnn

SEQ ID NO: 527 - RNA, 21 nt, synthetic construct
  source 1..21: mol_type = other RNA; note = Description of Artificial Sequence: Synthetic oligonucleotide; note = Description of Combined DNA/RNA Molecule: Synthetic oligonucleotide
  misc_difference 20: note = modified_base - a, c, t, g, unknown or other, u or 2'-deoxythymidine-3'-phosphate
  misc_difference 21: note = modified_base - a, c, t, g, unknown or other, u or 2'-deoxythymidine-3'-phosphate
atgctgtccgaggcagtccnn

SEQ ID NO: 528 - RNA, 21 nt, synthetic construct
  source 1..21: mol_type = other RNA; note = Description of Artificial Sequence: Synthetic oligonucleotide; note = Description of Combined DNA/RNA Molecule: Synthetic oligonucleotide
  misc_difference 20: note = modified_base - a, c, t, g, unknown or other, u or 2'-deoxythymidine-3'-phosphate
  misc_difference 21: note = modified_base - a, c, t, g, unknown or other, u or 2'-deoxythymidine-3'-phosphate
ggactgcctcggacagcatnn

SEQ ID NO: 529 - RNA, 21 nt, synthetic construct
  source 1..21: mol_type = other RNA; note = Description of Artificial Sequence: Synthetic oligonucleotide; note = Description of Combined DNA/RNA Molecule: Synthetic oligonucleotide
  misc_difference 20: note = modified_base - a, c, t, g, unknown or other, u or 2'-deoxythymidine-3'-phosphate
  misc_difference 21: note = modified_base - a, c, t, g, unknown or other, u or 2'-deoxythymidine-3'-phosphate
ccgtgcatgtgttcagaaann

SEQ ID NO: 530 - RNA, 21 nt, synthetic construct
  source 1..21: mol_type = other RNA; note = Description of Artificial Sequence: Synthetic oligonucleotide; note = Description of Combined DNA/RNA Molecule: Synthetic oligonucleotide
  misc_difference 20: note = modified_base - a, c, t, g, unknown or other, u or 2'-deoxythymidine-3'-phosphate
  misc_difference 21: note = modified_base - a, c, t, g, unknown or other, u or 2'-deoxythymidine-3'-phosphate
tttctgaacacatgcacggnn

SEQ ID NO: 531 - RNA, 21 nt, synthetic construct
  source 1..21: mol_type = other RNA; note = Description of Artificial Sequence: Synthetic oligonucleotide; note = Description of Combined DNA/RNA Molecule: Synthetic oligonucleotide
  misc_difference 20: note = modified_base - a, c, t, g, unknown or other, u or 2'-deoxythymidine-3'-phosphate
  misc_difference 21: note = modified_base - a, c, t, g, unknown or other, u or 2'-deoxythymidine-3'-phosphate
agtctggagagctgcatggnn

SEQ ID NO: 532 - RNA, 21 nt, synthetic construct
  source 1..21: mol_type = other RNA; note = Description of Artificial Sequence: Synthetic oligonucleotide; note = Description of Combined DNA/RNA Molecule: Synthetic oligonucleotide
  misc_difference 20: note = modified_base - a, c, t, g, unknown or other, u or 2'-deoxythymidine-3'-phosphate
  misc_difference 21: note = modified_base - a, c, t, g, unknown or other, u or 2'-deoxythymidine-3'-phosphate
ccatgcagctctccagactnn

SEQ ID NO: 533 - RNA, 21 nt, synthetic construct
  source 1..21: mol_type = other RNA; note = Description of Artificial Sequence: Synthetic oligonucleotide; note = Description of Combined DNA/RNA Molecule: Synthetic oligonucleotide
  misc_difference 20: note = modified_base - a, c, t, g, unknown or other, u or 2'-deoxythymidine-3'-phosphate
  misc_difference 21: note = modified_base - a, c, t, g, unknown or other, u or 2'-deoxythymidine-3'-phosphate
catgggctcacaactgaggnn

SEQ ID NO: 534 - RNA, 21 nt, synthetic construct
  source 1..21: mol_type = other RNA; note = Description of Artificial Sequence: Synthetic oligonucleotide; note = Description of Combined DNA/RNA Molecule: Synthetic oligonucleotide
  misc_difference 20: note = modified_base - a, c, t, g, unknown or other, u or 2'-deoxythymidine-3'-phosphate
  misc_difference 21: note = modified_base - a, c, t, g, unknown or other, u or 2'-deoxythymidine-3'-phosphate
cctcagttgtgagcccatgnn

SEQ ID NO: 535 - RNA, 21 nt, synthetic construct
  source 1..21: mol_type = other RNA; note = Description of Artificial Sequence: Synthetic oligonucleotide; note = Description of Combined DNA/RNA Molecule: Synthetic oligonucleotide
  misc_difference 20: note = modified_base - a, c, t, g, unknown or other, u or 2'-deoxythymidine-3'-phosphate
  misc_difference 21: note = modified_base - a, c, t, g, unknown or other, u or 2'-deoxythymidine-3'-phosphate
tctcatcgtctgctcctccnn

SEQ ID NO: 536 - RNA, 21 nt, synthetic construct
  source 1..21: mol_type = other RNA; note = Description of Artificial Sequence: Synthetic oligonucleotide; note = Description of Combined DNA/RNA Molecule: Synthetic oligonucleotide
  misc_difference 20: note = modified_base - a, c, t, g, unknown or other, u or 2'-deoxythymidine-3'-phosphate
  misc_difference 21: note = modified_base - a, c, t, g, unknown or other, u or 2'-deoxythymidine-3'-phosphate
ggaggagcagacgatgagann

SEQ ID NO: 537 - RNA, 21 nt, synthetic construct
  source 1..21: mol_type = other RNA; note = Description of Artificial Sequence: Synthetic oligonucleotide; note = Description of Combined DNA/RNA Molecule: Synthetic oligonucleotide
  misc_difference 20: note = modified_base - a, c, t, g, unknown or other, u or 2'-deoxythymidine-3'-phosphate
  misc_difference 21: note = modified_base - a, c, t, g, unknown or other, u or 2'-deoxythymidine-3'-phosphate
ccccattccatgagcatgcnn

SEQ ID NO: 538 - RNA, 21 nt, synthetic construct
  source 1..21: mol_type = other RNA; note = Description of Artificial Sequence: Synthetic oligonucleotide; note = Description of Combined DNA/RNA Molecule: Synthetic oligonucleotide
  misc_difference 20: note = modified_base - a, c, t, g, unknown or other, u or 2'-deoxythymidine-3'-phosphate
  misc_difference 21: note = modified_base - a, c, t, g, unknown or other, u or 2'-deoxythymidine-3'-phosphate
gcatgctcatggaatggggnn

SEQ ID NO: 539 - RNA, 21 nt, synthetic construct
  source 1..21: mol_type = other RNA; note = Description of Artificial Sequence: Synthetic oligonucleotide; note = Description of Combined DNA/RNA Molecule: Synthetic oligonucleotide
  misc_difference 20: note = modified_base - a, c, t, g, unknown or other, u or 2'-deoxythymidine-3'-phosphate
  misc_difference 21: note = modified_base - a, c, t, g, unknown or other, u or 2'-deoxythymidine-3'-phosphate
gcccctactcctattccacnn

SEQ ID NO: 540 - RNA, 21 nt, synthetic construct
  source 1..21: mol_type = other RNA; note = Description of Artificial Sequence: Synthetic oligonucleotide; note = Description of Combined DNA/RNA Molecule: Synthetic oligonucleotide
  misc_difference 20: note = modified_base - a, c, t, g, unknown or other, u or 2'-deoxythymidine-3'-phosphate
  misc_difference 21: note = modified_base - a, c, t, g, unknown or other, u or 2'-deoxythymidine-3'-phosphate
gtggaataggagtaggggcnn

SEQ ID NO: 541 - RNA, 21 nt, synthetic construct
  source 1..21: mol_type = other RNA; note = Description of Artificial Sequence: Synthetic oligonucleotide; note = Description of Combined DNA/RNA Molecule: Synthetic oligonucleotide
  misc_difference 20: note = modified_base - a, c, t, g, unknown or other, u or 2'-deoxythymidine-3'-phosphate
  misc_difference 21: note = modified_base - a, c, t, g, unknown or other, u or 2'-deoxythymidine-3'-phosphate
ctattccaccacggctgtcnn

SEQ ID NO: 542 - RNA, 21 nt, synthetic construct
  source 1..21: mol_type = other RNA; note = Description of Artificial Sequence: Synthetic oligonucleotide; note = Description of Combined DNA/RNA Molecule: Synthetic oligonucleotide
  misc_difference 20: note = modified_base - a, c, t, g, unknown or other, u or 2'-deoxythymidine-3'-phosphate
  misc_difference 21: note = modified_base - a, c, t, g, unknown or other, u or 2'-deoxythymidine-3'-phosphate
gacagccgtggtggaatagnn

SEQ ID NO: 543 - RNA, 21 nt, synthetic construct
  source 1..21: mol_type = other RNA; note = Description of Artificial Sequence: Synthetic oligonucleotide; note = Description of Combined DNA/RNA Molecule: Synthetic oligonucleotide
  misc_difference 20: note = modified_base - a, c, t, g, unknown or other, u or 2'-deoxythymidine-3'-phosphate
  misc_difference 21: note = modified_base - a, c, t, g, unknown or other, u or 2'-deoxythymidine-3'-phosphate
cacggctgtcgtcaccaatnn

SEQ ID NO: 544 - RNA, 21 nt, synthetic construct
  source 1..21: mol_type = other RNA; note = Description of Artificial Sequence: Synthetic oligonucleotide; note = Description of Combined DNA/RNA Molecule: Synthetic oligonucleotide
  misc_difference 20: note = modified_base - a, c, t, g, unknown or other, u or 2'-deoxythymidine-3'-phosphate
  misc_difference 21: note = modified_base - a, c, t, g, unknown or other, u or 2'-deoxythymidine-3'-phosphate
attggtgacgacagccgtgnn

SEQ ID NO: 545 - RNA, 21 nt, synthetic construct
  source 1..21: mol_type = other RNA; note = Description of Artificial Sequence: Synthetic oligonucleotide; note = Description of Combined DNA/RNA Molecule: Synthetic oligonucleotide
  misc_difference 20: note = modified_base - a, c, t, g, unknown or other, u or 2'-deoxythymidine-3'-phosphate
  misc_difference 21: note = modified_base - a, c, t, g, unknown or other, u or 2'-deoxythymidine-3'-phosphate
aggacgagggatgggatttnn

SEQ ID NO: 546 - RNA, 21 nt, synthetic construct
  source 1..21: mol_type = other RNA; note = Description of Artificial Sequence: Synthetic oligonucleotide; note = Description of Combined DNA/RNA Molecule: Synthetic oligonucleotide
  misc_difference 20: note = modified_base - a, c, t, g, unknown or other, u or 2'-deoxythymidine-3'-phosphate
  misc_difference 21: note = modified_base - a, c, t, g, unknown or other, u or 2'-deoxythymidine-3'-phosphate
aaatcccatccctcgtcctnn

SEQ ID NO: 547 - RNA, 21 nt, synthetic construct
  source 1..21: mol_type = other RNA; note = Description of Artificial Sequence: Synthetic oligonucleotide; note = Description of Combined DNA/RNA Molecule: Synthetic oligonucleotide
  misc_difference 20: note = modified_base - a, c, t, g, unknown or other, u or 2'-deoxythymidine-3'-phosphate
  misc_difference 21: note = modified_base - a, c, t, g, unknown or other, u or 2'-deoxythymidine-3'-phosphate
tcacctcatatgctatgttnn

SEQ ID NO: 548 - RNA, 21 nt, synthetic construct
  source 1..21: mol_type = other RNA; note = Description of Artificial Sequence: Synthetic oligonucleotide; note = Description of Combined DNA/RNA Molecule: Synthetic oligonucleotide
  misc_difference 20: note = modified_base - a, c, t, g, unknown or other, u or 2'-deoxythymidine-3'-phosphate
  misc_difference 21: note = modified_base - a, c, t, g, unknown or other, u or 2'-deoxythymidine-3'-phosphate
aacatagcatatgaggtgann

SEQ ID NO: 549 - RNA, 21 nt, synthetic construct
  source 1..21: mol_type = other RNA; note = Description of Artificial Sequence: Synthetic oligonucleotide; note = Description of Combined DNA/RNA Molecule: Synthetic oligonucleotide
  misc_difference 20: note = modified_base - a, c, t, g, unknown or other, u or 2'-deoxythymidine-3'-phosphate
  misc_difference 21: note = modified_base - a, c, t, g, unknown or other, u or 2'-deoxythymidine-3'-phosphate
cctcatatgctatgttagann

SEQ ID NO: 550 - RNA, 21 nt, synthetic construct
  source 1..21: mol_type = other RNA; note = Description of Artificial Sequence: Synthetic oligonucleotide; note = Description of Combined DNA/RNA Molecule: Synthetic oligonucleotide
  misc_difference 20: note = modified_base - a, c, t, g, unknown or other, u or 2'-deoxythymidine-3'-phosphate
  misc_difference 21: note = modified_base - a, c, t, g, unknown or other, u or 2'-deoxythymidine-3'-phosphate
tctaacatagcatatgaggnn

SEQ ID NO: 551 - RNA, 21 nt, synthetic construct
  source 1..21: mol_type = other RNA; note = Description of Artificial Sequence: Synthetic oligonucleotide; note = Description of Combined DNA/RNA Molecule: Synthetic oligonucleotide
  misc_difference 20: note = modified_base - a, c, t, g, unknown or other, u or 2'-deoxythymidine-3'-phosphate
  misc_difference 21: note = modified_base - a, c, t, g, unknown or other, u or 2'-deoxythymidine-3'-phosphate
atgttagaagtccaggcagnn

SEQ ID NO: 552 - RNA, 21 nt, synthetic construct
  source 1..21: mol_type = other RNA; note = Description of Artificial Sequence: Synthetic oligonucleotide; note = Description of Combined DNA/RNA Molecule: Synthetic oligonucleotide
  misc_difference 20: note = modified_base - a, c, t, g, unknown or other, u or 2'-deoxythymidine-3'-phosphate
  misc_difference 21: note = modified_base - a, c, t, g, unknown or other, u or 2'-deoxythymidine-3'-phosphate
ctgcctggacttctaacatnn

SEQ ID NO: 553 - RNA, 21 nt, synthetic construct
  source 1..21: mol_type = other RNA; note = Description of Artificial Sequence: Synthetic oligonucleotide; note = Description of Combined DNA/RNA Molecule: Synthetic oligonucleotide
  misc_difference 20: note = modified_base - a, c, t, g, unknown or other, u or 2'-deoxythymidine-3'-phosphate
  misc_difference 21: note = modified_base - a, c, t, g, unknown or other, u or 2'-deoxythymidine-3'-phosphate
tctgaggctggccctacggnn

SEQ ID NO: 554 - RNA, 21 nt, synthetic construct
  source 1..21: mol_type = other RNA; note = Description of Artificial Sequence: Synthetic oligonucleotide; note = Description of Combined DNA/RNA Molecule: Synthetic oligonucleotide
  misc_difference 20: note = modified_base - a, c, t, g, unknown or other, u or 2'-deoxythymidine-3'-phosphate
  misc_difference 21: note = modified_base - a, c, t, g, unknown or other, u or 2'-deoxythymidine-3'-phosphate
ccgtagggccagcctcagann

SEQ ID NO: 555 - RNA, 21 nt, synthetic construct
  source 1..21: mol_type = other RNA; note = Description of Artificial Sequence: Synthetic oligonucleotide; note = Description of Combined DNA/RNA Molecule: Synthetic oligonucleotide
  misc_difference 20: note = modified_base - a, c, t, g, unknown or other, u or 2'-deoxythymidine-3'-phosphate
  misc_difference 21: note = modified_base - a, c, t, g, unknown or other, u or 2'-deoxythymidine-3'-phosphate
ggccctacgggcaccggtgnn

SEQ ID NO: 556 - RNA, 21 nt, synthetic construct
  source 1..21: mol_type = other RNA; note = Description of Artificial Sequence: Synthetic oligonucleotide; note = Description of Combined DNA/RNA Molecule: Synthetic oligonucleotide
  misc_difference 20: note = modified_base - a, c, t, g, unknown or other, u or 2'-deoxythymidine-3'-phosphate
  misc_difference 21: note = modified_base - a, c, t, g, unknown or other, u or 2'-deoxythymidine-3'-phosphate
caccggtgcccgtagggccnn

SEQ ID NO: 557 - RNA, 21 nt, synthetic construct
  source 1..21: mol_type = other RNA; note = Description of Artificial Sequence: Synthetic oligonucleotide; note = Description of Combined DNA/RNA Molecule: Synthetic oligonucleotide
  misc_difference 20: note = modified_base - a, c, t, g, unknown or other, u or 2'-deoxythymidine-3'-phosphate
  misc_difference 21: note = modified_base - a, c, t, g, unknown or other, u or 2'-deoxythymidine-3'-phosphate
gggcaccggtgaatccaagnn

SEQ ID NO: 558 - RNA, 21 nt, synthetic construct
  source 1..21: mol_type = other RNA; note = Description of Artificial Sequence: Synthetic oligonucleotide; note = Description of Combined DNA/RNA Molecule: Synthetic oligonucleotide
  misc_difference 20: note = modified_base - a, c, t, g, unknown or other, u or 2'-deoxythymidine-3'-phosphate
  misc_difference 21: note = modified_base - a, c, t, g, unknown or other, u or 2'-deoxythymidine-3'-phosphate
cttggattcaccggtgcccnn

SEQ ID NO: 559 - RNA, 21 nt, synthetic construct
  source 1..21: mol_type = other RNA; note = Description of Artificial Sequence: Synthetic oligonucleotide; note = Description of Combined DNA/RNA Molecule: Synthetic oligonucleotide
  misc_difference 20: note = modified_base - a, c, t, g, unknown or other, u or 2'-deoxythymidine-3'-phosphate
  misc_difference 21: note = modified_base - a, c, t, g, unknown or other, u or 2'-deoxythymidine-3'-phosphate
ccatgcatgtgttcagaaann

SEQ ID NO: 560 - RNA, 21 nt, synthetic construct
  source 1..21: mol_type = other RNA; note = Description of Artificial Sequence: Synthetic oligonucleotide; note = Description of Combined DNA/RNA Molecule: Synthetic oligonucleotide
  misc_difference 20: note = modified_base - a, c, t, g, unknown or other, u or 2'-deoxythymidine-3'-phosphate
  misc_difference 21: note = modified_base - a, c, t, g, unknown or other, u or 2'-deoxythymidine-3'-phosphate
tttctgaacacatgcatggnn

SEQ ID NO: 561 - DNA, 21 bp, synthetic construct
  source 1..21: mol_type = other DNA; note = Description of Artificial Sequence: Synthetic oligonucleotide; note = Description of Combined DNA/RNA Molecule: Synthetic oligonucleotide
  misc_feature 1..19: note = RNA
  misc_feature 20..21: note = DNA
ccggtgaatccaagtgtcctt

SEQ ID NO: 562 - DNA, 21 bp, synthetic construct
  source 1..21: mol_type = other DNA; note = Description of Artificial Sequence: Synthetic oligonucleotide; note = Description of Combined DNA/RNA Molecule: Synthetic oligonucleotide
  misc_feature 1..19: note = RNA
  misc_feature 20..21: note = DNA
ggacacttggattcaccggtt

SEQ ID NO: 563 - DNA, 21 bp, synthetic construct
  source 1..21: mol_type = other DNA; note = Description of Artificial Sequence: Synthetic oligonucleotide; note = Description of Combined DNA/RNA Molecule: Synthetic oligonucleotide
  misc_feature 1..19: note = RNA
  misc_feature 20..21: note = DNA
actcattcttggcaggatgtt

SEQ ID NO: 564 - DNA, 21 bp, synthetic construct
  source 1..21: mol_type = other DNA; note = Description of Artificial Sequence: Synthetic oligonucleotide; note = Description of Combined DNA/RNA Molecule: Synthetic oligonucleotide
  misc_feature 1..19: note = RNA
  misc_feature 20..21: note = DNA
catcctgccaagaatgagttt

SEQ ID NO: 565 - DNA, 21 bp, synthetic construct
  source 1..21: mol_type = other DNA; note = Description of Artificial Sequence: Synthetic oligonucleotide; note = Description of Combined DNA/RNA Molecule: Synthetic oligonucleotide
  misc_feature 1..19: note = RNA
  misc_feature 20..21: note = DNA
aagtgtcctctgatggtcatt

SEQ ID NO: 566 - DNA, 21 bp, synthetic construct
  source 1..21: mol_type = other DNA; note = Description of Artificial Sequence: Synthetic oligonucleotide; note = Description of Combined DNA/RNA Molecule: Synthetic oligonucleotide
  misc_feature 1..19: note = RNA
  misc_feature 20..21: note = DNA
tgaccatcagaggacactttt

SEQ ID NO: 567 - DNA, 21 bp, synthetic construct
  source 1..21: mol_type = other DNA; note = Description of Artificial Sequence: Synthetic oligonucleotide; note = Description of Combined DNA/RNA Molecule: Synthetic oligonucleotide
  misc_feature 1..19: note = RNA
  misc_feature 20..21: note = DNA
tcattcttggcaggatggctt

SEQ ID NO: 568 - DNA, 21 bp, synthetic construct
  source 1..21: mol_type = other DNA; note = Description of Artificial Sequence: Synthetic oligonucleotide; note = Description of Combined DNA/RNA Molecule: Synthetic oligonucleotide
  misc_feature 1..19: note = RNA
  misc_feature 20..21: note = DNA
gccatcctgccaagaatgatt

SEQ ID NO: 569 - DNA, 21 bp, synthetic construct
  source 1..21: mol_type = other DNA; note = Description of Artificial Sequence: Synthetic oligonucleotide; note = Description of Combined DNA/RNA Molecule: Synthetic oligonucleotide
  misc_feature 1..19: note = RNA
  misc_feature 20..21: note = DNA
aagttctagatgctgtccgtt

SEQ ID NO: 570 - DNA, 21 bp, synthetic construct
  source 1..21: mol_type = other DNA; note = Description of Artificial Sequence: Synthetic oligonucleotide; note = Description of Combined DNA/RNA Molecule: Synthetic oligonucleotide
  misc_feature 1..19: note = RNA
  misc_feature 20..21: note = DNA
cggacagcatctagaactttt

SEQ ID NO: 571 - DNA, 21 bp, synthetic construct
  source 1..21: mol_type = other DNA; note = Description of Artificial Sequence: Synthetic oligonucleotide; note = Description of Combined DNA/RNA Molecule: Synthetic oligonucleotide
  misc_feature 1..19: note = RNA
  misc_feature 20..21: note = DNA
gttctagatgctgtccgagtt

SEQ ID NO: 572 - DNA, 21 bp, synthetic construct
  source 1..21: mol_type = other DNA; note = Description of Artificial Sequence: Synthetic oligonucleotide; note = Description of Combined DNA/RNA Molecule: Synthetic oligonucleotide
  misc_feature 1..19: note = RNA
  misc_feature 20..21: note = DNA
ctcggacagcatctagaactt

SEQ ID NO: 573 - DNA, 21 bp, synthetic construct
  source 1..21: mol_type = other DNA; note = Description of Artificial Sequence: Synthetic oligonucleotide; note = Description of Combined DNA/RNA Molecule: Synthetic oligonucleotide
  misc_feature 1..19: note = RNA
  misc_feature 20..21: note = DNA
ctagatgctgtccgaggcatt

SEQ ID NO: 574 - DNA, 21 bp, synthetic construct
  source 1..21: mol_type = other DNA; note = Description of Artificial Sequence: Synthetic oligonucleotide; note = Description of Combined DNA/RNA Molecule: Synthetic oligonucleotide
  misc_feature 1..19: note = RNA
  misc_feature 20..21: note = DNA
tgcctcggacagcatctagtt

SEQ ID NO: 575 - DNA, 21 bp, synthetic construct
  source 1..21: mol_type = other DNA; note = Description of Artificial Sequence: Synthetic oligonucleotide; note = Description of Combined DNA/RNA Molecule: Synthetic oligonucleotide
  misc_feature 1..19: note = RNA
  misc_feature 20..21: note = DNA
gatgctgtccgaggcagtctt

SEQ ID NO: 576 - DNA, 21 bp, synthetic construct
  source 1..21: mol_type = other DNA; note = Description of Artificial Sequence: Synthetic oligonucleotide; note = Description of Combined DNA/RNA Molecule: Synthetic oligonucleotide
  misc_feature 1..19: note = RNA
  misc_feature 20..21: note = DNA
gactgcctcggacagcatctt

SEQ ID NO: 577 - DNA, 21 bp, synthetic construct
  source 1..21: mol_type = other DNA; note = Description of Artificial Sequence: Synthetic oligonucleotide; note = Description of Combined DNA/RNA Molecule: Synthetic oligonucleotide
  misc_feature 1..19: note = RNA
  misc_feature 20..21: note = DNA
cattcttggcaggatggcttt

SEQ ID NO: 578 - DNA, 21 bp, synthetic construct
  source 1..21: mol_type = other DNA; note = Description of Artificial Sequence: Synthetic oligonucleotide; note = Description of Combined DNA/RNA Molecule: Synthetic oligonucleotide
  misc_feature 1..19: note = RNA
  misc_feature 20..21: note = DNA
agccatcctgccaagaatgtt

SEQ ID NO: 579 - DNA, 21 bp, synthetic construct
  source 1..21: mol_type = other DNA; note = Description of Artificial Sequence: Synthetic oligonucleotide; note = Description of Combined DNA/RNA Molecule: Synthetic oligonucleotide
  misc_feature 1..19: note = RNA
  misc_feature 20..21: note = DNA
tgctgtccgaggcagtccttt

SEQ ID NO: 580 - DNA, 21 bp, synthetic construct
  source 1..21: mol_type = other DNA; note = Description of Artificial Sequence: Synthetic oligonucleotide; note = Description of Combined DNA/RNA Molecule: Synthetic oligonucleotide
  misc_feature 1..19: note = RNA
  misc_feature 20..21: note = DNA
aggactgcctcggacagcatt

SEQ ID NO: 581 - DNA, 21 bp, synthetic construct
  source 1..21: mol_type = other DNA; note = Description of Artificial Sequence: Synthetic oligonucleotide; note = Description of Combined DNA/RNA Molecule: Synthetic oligonucleotide
  misc_feature 1..19: note = RNA
  misc_feature 20..21: note = DNA
ccgaggcagtcctgccatctt

SEQ ID NO: 582 - DNA, 21 bp, synthetic construct
  source 1..21: mol_type = other DNA; note = Description of Artificial Sequence: Synthetic oligonucleotide; note = Description of Combined DNA/RNA Molecule: Synthetic oligonucleotide
  misc_feature 1..19: note = RNA
  misc_feature 20..21: note = DNA
gatggcaggactgcctcggtt

SEQ ID NO: 583 - DNA, 21 bp, synthetic construct
  source 1..21: mol_type = other DNA; note = Description of Artificial Sequence: Synthetic oligonucleotide; note = Description of Combined DNA/RNA Molecule: Synthetic oligonucleotide
  misc_feature 1..19: note = RNA
  misc_feature 20..21: note = DNA
cagtcctgccatcaatgtgtt

SEQ ID NO: 584 - DNA, 21 bp, synthetic construct
  source 1..21: mol_type = other DNA; note = Description of Artificial Sequence: Synthetic oligonucleotide; note = Description of Combined DNA/RNA Molecule: Synthetic oligonucleotide
  misc_feature 1..19: note = RNA
  misc_feature 20..21: note = DNA
cacattgatggcaggactgtt

SEQ ID NO: 585 - DNA, 21 bp, synthetic construct
  source 1..21: mol_type = other DNA; note = Description of Artificial Sequence: Synthetic oligonucleotide; note = Description of Combined DNA/RNA Molecule: Synthetic oligonucleotide
  misc_feature 1..19: note = RNA
  misc_feature 20..21: note = DNA
caatgtggccgtgcatgtgtt

SEQ ID NO: 586 - DNA, 21 bp, synthetic construct
  source 1..21: mol_type = other DNA; note = Description of Artificial Sequence: Synthetic oligonucleotide; note = Description of Combined DNA/RNA Molecule: Synthetic oligonucleotide
  misc_feature 1..19: note = RNA
  misc_feature 20..21: note = DNA
cacatgcacggccacattgtt

SEQ ID NO: 587 - DNA, 21 bp, synthetic construct
  source 1..21: mol_type = other DNA; note = Description of Artificial Sequence: Synthetic oligonucleotide; note = Description of Combined DNA/RNA Molecule: Synthetic oligonucleotide
  misc_feature 1..19: note = RNA
  misc_feature 20..21: note = DNA
atgtgttcagaaaggctgctt

SEQ ID NO: 588 - DNA, 21 bp, synthetic construct
  source 1..21: mol_type = other DNA; note = Description of Artificial Sequence: Synthetic oligonucleotide; note = Description of Combined DNA/RNA Molecule: Synthetic oligonucleotide
  misc_feature 1..19: note = RNA
  misc_feature 20..21: note = DNA
gcagcctttctgaacacattt

SEQ ID NO: 589 - DNA, 21 bp, synthetic construct
  source 1..21: mol_type = other DNA; note = Description of Artificial Sequence: Synthetic oligonucleotide; note = Description of Combined DNA/RNA Molecule: Synthetic oligonucleotide
  misc_feature 1..19: note = RNA
  misc_feature 20..21: note = DNA
cagaagtccactcattctttt

SEQ ID NO: 590 - DNA, 21 bp, synthetic construct
  source 1..21: mol_type = other DNA; note = Description of Artificial Sequence: Synthetic oligonucleotide; note = Description of Combined DNA/RNA Molecule: Synthetic oligonucleotide
  misc_feature 1..19: note = RNA
  misc_feature 20..21: note = DNA
aagaatgagtggacttctgtt

SEQ ID NO: 591 - DNA, 21 bp, synthetic construct
  source 1..21: mol_type = other DNA; note = Description of Artificial Sequence: Synthetic oligonucleotide; note = Description of Combined DNA/RNA Molecule: Synthetic oligonucleotide
  misc_feature 1..19: note = RNA
  misc_feature 20..21: note = DNA
ggcaggatggcttctcatctt

SEQ ID NO: 592 - DNA, 21 bp, synthetic construct
  source 1..21: mol_type = other DNA; note = Description of Artificial Sequence: Synthetic oligonucleotide; note = Description of Combined DNA/RNA Molecule: Synthetic oligonucleotide
  misc_feature 1..19: note = RNA
  misc_feature 20..21: note = DNA
gatgagaagccatcctgcctt

SEQ ID NO: 593 - DNA, 21 bp, synthetic construct
  source 1..21: mol_type = other DNA; note = Description of Artificial Sequence: Synthetic oligonucleotide; note = Description of Combined DNA/RNA Molecule: Synthetic oligonucleotide
  misc_feature 1..19: note = RNA
  misc_feature 20..21: note = DNA
gagccatttgcctctgggatt

SEQ ID NO: 594 - DNA, 21 bp, synthetic construct
  source 1..21: mol_type = other DNA; note = Description of Artificial Sequence: Synthetic oligonucleotide; note = Description of Combined DNA/RNA Molecule: Synthetic oligonucleotide
  misc_feature 1..19: note = RNA
  misc_feature 20..21: note = DNA
tcccagaggcaaatggctctt

SEQ ID NO: 595 - DNA, 21 bp, synthetic construct
  source 1..21: mol_type = other DNA; note = Description of Artificial Sequence: Synthetic oligonucleotide; note = Description of Combined DNA/RNA Molecule: Synthetic oligonucleotide
  misc_feature 1..19: note = RNA
  misc_feature 20..21: note = DNA
caggatggcttctcatcgttt

SEQ ID NO: 596 - DNA, 21 bp, synthetic construct
  source 1..21: mol_type = other DNA; note = Description of Artificial Sequence: Synthetic oligonucleotide; note = Description of Combined DNA/RNA Molecule: Synthetic oligonucleotide
  misc_feature 1..19: note = RNA
  misc_feature 20..21: note = DNA
acgatgagaagccatcctgtt

SEQ ID NO: 597 - DNA, 21 bp, synthetic construct
  source 1..21: mol_type = other DNA; note = Description of Artificial Sequence: Synthetic oligonucleotide; note = Description of Combined DNA/RNA Molecule: Synthetic oligonucleotide
  misc_feature 1..19: note = RNA
  misc_feature 20..21: note = DNA
aggatggcttctcatcgtctt

SEQ ID NO: 598 - DNA, 21 bp, synthetic construct
  source 1..21: mol_type = other DNA; note = Description of Artificial Sequence: Synthetic oligonucleotide; note = Description of Combined DNA/RNA Molecule: Synthetic oligonucleotide
  misc_feature 1..19: note = RNA
  misc_feature 20..21: note = DNA
gacgatgagaagccatccttt

SEQ ID NO: 599 - DNA, 21 bp, synthetic construct
  source 1..21: mol_type = other DNA; note = Description of Artificial Sequence: Synthetic oligonucleotide; note = Description of Combined DNA/RNA Molecule: Synthetic oligonucleotide
  misc_feature 1..19: note = RNA
  misc_feature 20..21: note = DNA
agagctgcatgggctcacatt

SEQ ID NO: 600 - DNA, 21 bp, synthetic construct
  source 1..21: mol_type = other DNA; note = Description of Artificial Sequence: Synthetic oligonucleotide; note = Description of Combined DNA/RNA Molecule: Synthetic oligonucleotide
  misc_feature 1..19: note = RNA
  misc_feature 20..21: note = DNA
tgtgagcccatgcagctcttt

SEQ ID NO: 601 - DNA, 21 bp, synthetic construct
  source 1..21: mol_type = other DNA; note = Description of Artificial Sequence: Synthetic oligonucleotide; note = Description of Combined DNA/RNA Molecule: Synthetic oligonucleotide
  misc_feature 1..19: note = RNA
  misc_feature 20..21: note = DNA
gctgcatgggctcacaacttt

SEQ ID NO: 602 - DNA, 21 bp, synthetic construct
  source 1..21: mol_type = other DNA; note = Description of Artificial Sequence: Synthetic oligonucleotide; note = Description of Combined DNA/RNA Molecule: Synthetic oligonucleotide
  misc_feature 1..19: note = RNA
  misc_feature 20..21: note = DNA
agttgtgagcccatgcagctt

SEQ ID NO: 603 - DNA, 21 bp, synthetic construct
  source 1..21: mol_type = other DNA; note = Description of Artificial Sequence: Synthetic oligonucleotide; note = Description of Combined DNA/RNA Molecule: Synthetic oligonucleotide
  misc_feature 1..19: note = RNA
  misc_feature 20..21: note = DNA
ggatggcttctcatcgtcttt

SEQ ID NO: 604 - DNA, 21 bp, synthetic construct
  source 1..21: mol_type = other DNA; note = Description of Artificial Sequence: Synthetic oligonucleotide; note = Description of Combined DNA/RNA Molecule: Synthetic oligonucleotide
  misc_feature 1..19: note = RNA
  misc_feature 20..21: note = DNA
agacgatgagaagccatcctt

SEQ ID NO: 605 - DNA, 21 bp, synthetic construct
  source 1..21: mol_type = other DNA; note = Description of Artificial Sequence: Synthetic oligonucleotide; note = Description of Combined DNA/RNA Molecule: Synthetic oligonucleotide
  misc_feature 1..19: note = RNA
  misc_feature 20..21: note = DNA
gcatgggctcacaactgagtt

SEQ ID NO: 606 - DNA, 21 bp, synthetic construct
  source 1..21: mol_type = other DNA; note = Description of Artificial Sequence: Synthetic oligonucleotide; note = Description of Combined DNA/RNA Molecule: Synthetic oligonucleotide
  misc_feature 1..19: note = RNA
  misc_feature 20..21: note = DNA
ctcagttgtgagcccatgctt

SEQ ID NO: 607 - DNA, 21 bp, synthetic construct
  source 1..21: mol_type = other DNA; note = Description of Artificial Sequence: Synthetic oligonucleotide; note = Description of Combined DNA/RNA Molecule: Synthetic oligonucleotide
  misc_feature 1..19: note = RNA
  misc_feature 20..21: note = DNA
atgggctcacaactgaggatt

SEQ ID NO: 608 - DNA, 21 bp, synthetic construct
  source 1..21: mol_type = other DNA; note = Description of Artificial Sequence: Synthetic oligonucleotide; note = Description of Combined DNA/RNA Molecule: Synthetic oligonucleotide
  misc_feature 1..19: note = RNA
  misc_feature 20..21: note = DNA
tcctcagttgtgagcccattt

SEQ ID NO: 609 - DNA, 21 bp, synthetic construct
  source 1..21: mol_type = other DNA; note = Description of Artificial Sequence: Synthetic oligonucleotide; note = Description of Combined DNA/RNA Molecule: Synthetic oligonucleotide
  misc_feature 1..19: note = RNA
  misc_feature 20..21: note = DNA
tgggctcacaactgaggagtt

SEQ ID NO: 610 - DNA, 21 bp, synthetic construct
  source 1..21: mol_type = other DNA; note = Description of Artificial Sequence: Synthetic oligonucleotide; note = Description of Combined DNA/RNA Molecule: Synthetic oligonucleotide
  misc_feature 1..19: note = RNA
  misc_feature 20..21: note = DNA
ctcctcagttgtgagcccatt

SEQ ID NO: 611 - DNA, 21 bp, synthetic construct
  source 1..21: mol_type = other DNA; note = Description of Artificial Sequence: Synthetic oligonucleotide; note = Description of Combined DNA/RNA Molecule: Synthetic oligonucleotide
  misc_feature 1..19: note = RNA
  misc_feature 20..21: note = DNA
gaggaatttgtagaagggatt

SEQ ID NO: 612 - DNA, 21 bp, synthetic construct
  source 1..21: mol_type = other DNA; note = Description of Artificial Sequence: Synthetic oligonucleotide; note = Description of Combined DNA/RNA Molecule: Synthetic oligonucleotide
  misc_feature 1..19: note = RNA
  misc_feature 20..21: note = DNA
tcccttctacaaattcctctt

SEQ ID NO: 613 - DNA, 21 bp, synthetic construct
  source 1..21: mol_type = other DNA; note = Description of Artificial Sequence: Synthetic oligonucleotide; note = Description of Combined DNA/RNA Molecule: Synthetic oligonucleotide
  misc_feature 1..19: note = RNA
  misc_feature 20..21: note = DNA
tttgtagaagggatatacatt

SEQ ID NO: 614 - DNA, 21 bp, synthetic construct
  source 1..21: mol_type = other DNA; note = Description of Artificial Sequence: Synthetic oligonucleotide; note = Description of Combined DNA/RNA Molecule: Synthetic oligonucleotide
  misc_feature 1..19: note = RNA
  misc_feature 20..21: note = DNA
tgtatatcccttctacaaatt

SEQ ID NO: 615 - DNA, 21 bp, synthetic construct
  source 1..21: mol_type = other DNA; note = Description of Artificial Sequence: Synthetic oligonucleotide; note = Description of Combined DNA/RNA Molecule: Synthetic oligonucleotide
  misc_feature 1..19: note = RNA
  misc_feature 20..21: note = DNA
ttgtagaagggatatacaatt

SEQ ID NO: 616 - DNA, 21 bp, synthetic construct
  source 1..21: mol_type = other DNA; note = Description of Artificial Sequence: Synthetic oligonucleotide; note = Description of Combined DNA/RNA Molecule: Synthetic oligonucleotide
  misc_feature 1..19: note = RNA
  misc_feature 20..21: note = DNA
ttgtatatcccttctacaatt

SEQ ID NO: 617 - DNA, 21 bp, synthetic construct
  source 1..21: mol_type = other DNA; note = Description of Artificial Sequence: Synthetic oligonucleotide; note = Description of Combined DNA/RNA Molecule: Synthetic oligonucleotide
  misc_feature 1..19: note = RNA
  misc_feature 20..21: note = DNA
tgtagaagggatatacaaatt

SEQ ID NO: 618 - DNA, 21 bp, synthetic construct
  source 1..21: mol_type = other DNA; note = Description of Artificial Sequence: Synthetic oligonucleotide; note = Description of Combined DNA/RNA Molecule: Synthetic oligonucleotide
  misc_feature 1..19: note = RNA
  misc_feature 20..21: note = DNA
tttgtatatcccttctacatt

SEQ ID NO: 619 - DNA, 21 bp, synthetic construct
  source 1..21: mol_type = other DNA; note = Description of Artificial Sequence: Synthetic oligonucleotide; note = Description of Combined DNA/RNA Molecule: Synthetic oligonucleotide
  misc_feature 1..19: note = RNA
  misc_feature 20..21: note = DNA
agaagggatatacaaagtgtt

SEQ ID NO: 620 - DNA, 21 bp, synthetic construct
  source 1..21: mol_type = other DNA; note = Description of Artificial Sequence: Synthetic oligonucleotide; note = Description of Combined DNA/RNA Molecule: Synthetic oligonucleotide
  misc_feature 1..19: note = RNA
  misc_feature 20..21: note = DNA
cactttgtatatcccttcttt

SEQ ID NO: 621 - DNA, 21 bp, synthetic construct
  source 1..21: mol_type = other DNA; note = Description of Artificial Sequence: Synthetic oligonucleotide; note = Description of Combined DNA/RNA Molecule: Synthetic oligonucleotide
  misc_feature 1..19: note = RNA
  misc_feature 20..21: note = DNA
aagtggaaatagacaccaatt

SEQ ID NO: 622 - DNA, 21 bp, synthetic construct
  source 1..21: mol_type = other DNA; note = Description of Artificial Sequence: Synthetic oligonucleotide; note = Description of Combined DNA/RNA Molecule: Synthetic oligonucleotide
  misc_feature 1..19: note = RNA
  misc_feature 20..21: note = DNA
ttggtgtctatttccactttt

SEQ ID NO: 623 - DNA, 21 bp, synthetic construct
  source 1..21: mol_type = other DNA; note = Description of Artificial Sequence: Synthetic oligonucleotide; note = Description of Combined DNA/RNA Molecule: Synthetic oligonucleotide
  misc_feature 1..19: note = RNA
  misc_feature 20..21: note = DNA
ggaaatagacaccaaatcttt

SEQ ID NO: 624 - DNA, 21 bp, synthetic construct
  source 1..21: mol_type = other DNA; note = Description of Artificial Sequence: Synthetic oligonucleotide; note = Description of Combined DNA/RNA Molecule: Synthetic oligonucleotide
  misc_feature 1..19: note = RNA
  misc_feature 20..21: note = DNA
agatttggtgtctatttcctt

SEQ ID NO: 625 - DNA, 21 bp, synthetic construct
  source 1..21: mol_type = other DNA; note = Description of Artificial Sequence: Synthetic oligonucleotide; note = Description of Combined DNA/RNA Molecule: Synthetic oligonucleotide
  misc_feature 1..19: note = RNA
  misc_feature 20..21: note = DNA
gaaatagacaccaaatctttt

SEQ ID NO: 626 - DNA, 21 bp, synthetic construct
  source 1..21: mol_type = other DNA; note = Description of Artificial Sequence: Synthetic oligonucleotide; note = Description of Combined DNA/RNA Molecule: Synthetic oligonucleotide
  misc_feature 1..19: note = RNA
  misc_feature 20..21: note = DNA
aagatttggtgtctatttctt

SEQ ID NO: 627 - DNA, 21 bp, synthetic construct
  source 1..21: mol_type = other DNA; note = Description of Artificial Sequence: Synthetic oligonucleotide; note = Description of Combined DNA/RNA Molecule: Synthetic oligonucleotide
  misc_feature 1..19: note = RNA
  misc_feature 20..21: note = DNA
atagacaccaaatcttacttt

SEQ ID NO: 628 - DNA, 21 bp, synthetic construct
  source 1..21: mol_type = other DNA; note = Description of Artificial Sequence: Synthetic oligonucleotide; note = Description of Combined DNA/RNA Molecule: Synthetic oligonucleotide
  misc_feature 1..19: note = RNA
  misc_feature 20..21: note = DNA
agtaagatttggtgtctattt

SEQ ID NO: 629 - DNA, 21 bp, synthetic construct
  source 1..21: mol_type = other DNA; note = Description of Artificial Sequence: Synthetic oligonucleotide; note = Description of Combined DNA/RNA Molecule: Synthetic oligonucleotide
  misc_feature 1..19: note = RNA
  misc_feature 20..21: note = DNA
tagacaccaaatcttactgtt

SEQ ID NO: 630 - DNA, 21 bp, synthetic construct
  source 1..21: mol_type = other DNA; note = Description of Artificial Sequence: Synthetic oligonucleotide; note = Description of Combined DNA/RNA Molecule: Synthetic oligonucleotide
  misc_feature 1..19: note = RNA
  misc_feature 20..21: note = DNA
cagtaagatttggtgtctatt

SEQ ID NO: 631 - DNA, 21 bp, synthetic construct
  source 1..21: mol_type = other DNA; note = Description of Artificial Sequence: Synthetic oligonucleotide; note = Description of Combined DNA/RNA Molecule: Synthetic oligonucleotide
  misc_feature 1..19: note = RNA
  misc_feature 20..21: note = DNA
agacaccaaatcttactggtt

SEQ ID NO: 632 - DNA, 21 bp, synthetic construct
  source 1..21: mol_type = other DNA; note = Description of Artificial Sequence: Synthetic oligonucleotide; note = Description of Combined DNA/RNA Molecule: Synthetic oligonucleotide
  misc_feature 1..19: note = RNA
  misc_feature 20..21: note = DNA
ccagtaagatttggtgtcttt

SEQ ID NO: 633 - DNA, 21 bp, synthetic construct
  source 1..21: mol_type = other DNA; note = Description of Artificial Sequence: Synthetic oligonucleotide; note = Description of Combined DNA/RNA Molecule: Synthetic oligonucleotide
  misc_feature 1..19: note = RNA
  misc_feature 20..21: note = DNA
ttactggaaggcacttggctt

SEQ ID NO: 634 - DNA, 21 bp, synthetic construct
  source 1..21: mol_type = other DNA; note = Description of Artificial Sequence: Synthetic oligonucleotide; note = Description of Combined DNA/RNA Molecule: Synthetic oligonucleotide
  misc_feature 1..19: note = RNA
  misc_feature 20..21: note = DNA
gccaagtgccttccagtaatt

SEQ ID NO: 635 - DNA, 21 bp, synthetic construct
  source 1..21: mol_type = other DNA; note = Description of Artificial Sequence: Synthetic oligonucleotide; note = Description of Combined DNA/RNA Molecule: Synthetic oligonucleotide
  misc_feature 1..19: note = RNA
  misc_feature 20..21: note = DNA
ttctcatcgtctgctcctctt

SEQ ID NO: 636 - DNA, 21 bp, synthetic construct
  source 1..21: mol_type = other DNA; note = Description of Artificial Sequence: Synthetic oligonucleotide; note = Description of Combined DNA/RNA Molecule: Synthetic oligonucleotide
  misc_feature 1..19: note = RNA
  misc_feature 20..21: note = DNA
gaggagcagacgatgagaatt

SEQ ID NO: 637 - DNA, 21 bp, synthetic construct
  source 1..21: mol_type = other DNA; note = Description of Artificial Sequence: Synthetic oligonucleotide; note = Description of Combined DNA/RNA Molecule: Synthetic oligonucleotide
  misc_feature 1..19: note = RNA
  misc_feature 20..21: note = DNA
ggaaggcacttggcatctctt

SEQ ID NO: 638 - DNA, 21 bp, synthetic construct
  source 1..21: mol_type = other DNA; note = Description of Artificial Sequence: Synthetic oligonucleotide; note = Description of Combined DNA/RNA Molecule: Synthetic oligonucleotide
  misc_feature 1..19: note = RNA
  misc_feature 20..21: note = DNA
gagatgccaagtgccttcctt

SEQ ID NO: 639 - DNA, 21 bp, synthetic construct
  source 1..21: mol_type = other DNA; note = Description of Artificial Sequence: Synthetic oligonucleotide; note = Description of Combined DNA/RNA Molecule: Synthetic oligonucleotide
  misc_feature 1..19: note = RNA
  misc_feature 20..21: note = DNA
ggcacttggcatctccccatt

SEQ ID NO: 640 - DNA, 21 bp, synthetic construct
  source 1..21: mol_type = other DNA; note = Description of Artificial Sequence: Synthetic oligonucleotide; note = Description of Combined DNA/RNA Molecule: Synthetic oligonucleotide
  misc_feature 1..19: note = RNA
  misc_feature 20..21: note = DNA
tggggagatgccaagtgcctt

SEQ ID NO: 641 - DNA, 21 bp, synthetic construct
  source 1..21: mol_type = other DNA; note = Description of Artificial Sequence: Synthetic oligonucleotide; note = Description of Combined DNA/RNA Molecule: Synthetic oligonucleotide
  misc_feature 1..19: note = RNA
  misc_feature 20..21: note = DNA
ggcatctccccattccatgtt

SEQ ID NO: 642 - DNA, 22 bp, synthetic construct
  source 1..22: mol_type = other DNA; note = Description of Artificial Sequence: Synthetic oligonucleotide; note = Description of Combined DNA/RNA Molecule: Synthetic oligonucleotide
  misc_feature 1..18: note = RNA
  misc_feature 19..22: note = DNA
atggaatggggagatgcctttt

SEQ ID NO: 643 - DNA, 21 bp, synthetic construct
  source 1..21: mol_type = other DNA; note = Description of Artificial Sequence: Synthetic oligonucleotide; note = Description of Combined DNA/RNA Molecule: Synthetic oligonucleotide
  misc_feature 1..19: note = RNA
  misc_feature 20..21: note = DNA
gcatctccccattccatgatt

SEQ ID NO: 644 - DNA, 21 bp, synthetic construct
  source 1..21: mol_type = other DNA; note = Description of Artificial Sequence: Synthetic oligonucleotide; note = Description of Combined DNA/RNA Molecule: Synthetic oligonucleotide
  misc_feature 1..19: note = RNA
  misc_feature 20..21: note = DNA
tcatggaatggggagatgctt

SEQ ID NO: 645 - DNA, 21 bp, synthetic construct
  source 1..21: mol_type = other DNA; note = Description of Artificial Sequence: Synthetic oligonucleotide; note = Description of Combined DNA/RNA Molecule: Synthetic oligonucleotide
  misc_feature 1..19: note = RNA
  misc_feature 20..21: note = DNA
catctccccattccatgagtt

SEQ ID NO: 646 - DNA, 21 bp, synthetic construct
  source 1..21: mol_type = other DNA; note = Description of Artificial Sequence: Synthetic oligonucleotide; note = Description of Combined DNA/RNA Molecule: Synthetic oligonucleotide
  misc_feature 1..19: note = RNA
  misc_feature 20..21: note = DNA
ctcatggaatggggagatgtt

SEQ ID NO: 647 - DNA, 21 bp, synthetic construct
  source 1..21: mol_type = other DNA; note = Description of Artificial Sequence: Synthetic oligonucleotide; note = Description of Combined DNA/RNA Molecule: Synthetic oligonucleotide
  misc_feature 1..19: note = RNA
  misc_feature 20..21: note = DNA
atctccccattccatgagctt

SEQ ID NO: 648 - DNA, 21 bp, synthetic construct
  source 1..21: mol_type = other DNA; note = Description of Artificial Sequence: Synthetic oligonucleotide; note = Description of Combined DNA/RNA Molecule: Synthetic oligonucleotide
  misc_feature 1..19: note = RNA
  misc_feature 20..21: note = DNA
gctcatggaatggggagattt

SEQ ID NO: 649 - DNA, 21 bp, synthetic construct
  source 1..21: mol_type = other DNA; note = Description of Artificial Sequence: Synthetic oligonucleotide; note = Description of Combined DNA/RNA Molecule: Synthetic oligonucleotide
  misc_feature 1..19: note = RNA
  misc_feature 20..21: note = DNA
ctccccattccatgagcattt

SEQ ID NO: 650 - DNA, 21 bp, synthetic construct
  source 1..21: mol_type = other DNA; note = Description of Artificial Sequence: Synthetic oligonucleotide; note = Description of Combined DNA/RNA Molecule: Synthetic oligonucleotide
  misc_feature 1..19: note = RNA
  misc_feature 20..21: note = DNA
atgctcatggaatggggagtt

SEQ ID NO: 651 - DNA, 21 bp, synthetic construct
  source 1..21: mol_type = other DNA; note = Description of Artificial Sequence: Synthetic oligonucleotide; note = Description of Combined DNA/RNA Molecule: Synthetic oligonucleotide
  misc_feature 1..19: note = RNA
  misc_feature 20..21: note = DNA
cccattccatgagcatgcatt

SEQ ID NO: 652 - DNA, 21 bp, synthetic construct
  source 1..21: mol_type = other DNA; note = Description of Artificial Sequence: Synthetic oligonucleotide; note = Description of Combined DNA/RNA Molecule: Synthetic oligonucleotide
  misc_feature 1..19: note = RNA
  misc_feature 20..21: note = DNA
tgcatgctcatggaatgggtt

SEQ ID NO: 653 - DNA, 21 bp, synthetic construct
  source 1..21: mol_type = other DNA; note = Description of Artificial Sequence: Synthetic oligonucleotide; note = Description of Combined DNA/RNA Molecule: Synthetic oligonucleotide
  misc_feature 1..19: note = RNA
  misc_feature 20..21: note = DNA
ccatgagcatgcagaggtgtt

SEQ ID NO: 654 - DNA, 21 bp, synthetic construct
  source 1..21: mol_type = other DNA; note = Description of Artificial Sequence: Synthetic oligonucleotide; note = Description of Combined DNA/RNA Molecule: Synthetic oligonucleotide
  misc_feature 1..19: note = RNA
  misc_feature 20..21: note = DNA
cacctctgcatgctcatggtt

SEQ ID NO: 655 - DNA, 21 bp, synthetic construct
  source 1..21: mol_type = other DNA; note = Description of Artificial Sequence: Synthetic oligonucleotide; note = Description of Combined DNA/RNA Molecule: Synthetic oligonucleotide
  misc_feature 1..19: note = RNA
  misc_feature 20..21: note = DNA
agcatgcagaggtggtatttt

SEQ ID NO: 656 - DNA, 21 bp, synthetic construct
  source 1..21: mol_type = other DNA; note = Description of Artificial Sequence: Synthetic oligonucleotide; note = Description of Combined DNA/RNA Molecule: Synthetic oligonucleotide
  misc_feature 1..19: note = RNA
  misc_feature 20..21: note = DNA
aataccacctctgcatgcttt

SEQ ID NO: 657 - DNA, 21 bp, synthetic construct
  source 1..21: mol_type = other DNA; note = Description of Artificial Sequence: Synthetic oligonucleotide; note = Description of Combined DNA/RNA Molecule: Synthetic oligonucleotide
  misc_feature 1..19: note = RNA
  misc_feature 20..21: note = DNA
catgcagaggtggtattcatt

SEQ ID NO: 658 - DNA, 21 bp, synthetic construct
  source 1..21: mol_type = other DNA; note = Description of Artificial Sequence: Synthetic oligonucleotide; note = Description of Combined DNA/RNA Molecule: Synthetic oligonucleotide
  misc_feature 1..19: note = RNA
  misc_feature 20..21: note = DNA
tgaataccacctctgcatgtt

SEQ ID NO: 659 - DNA, 21 bp, synthetic construct
  source 1..21: mol_type = other DNA; note = Description of Artificial Sequence: Synthetic oligonucleotide; note = Description of Combined DNA/RNA Molecule: Synthetic oligonucleotide
  misc_feature 1..19: note = RNA
  misc_feature 20..21: note = DNA
atgcagaggtggtattcactt

SEQ ID NO: 660 - DNA, 21 bp, synthetic construct
  source 1..21: mol_type = other DNA; note = Description of Artificial Sequence: Synthetic oligonucleotide; note = Description of Combined DNA/RNA Molecule: Synthetic oligonucleotide
  misc_feature 1..19: note = RNA
  misc_feature 20..21: note = DNA
gtgaataccacctctgcattt

SEQ ID NO: 661 - DNA, 21 bp, synthetic construct
  source 1..21: mol_type = other DNA; note = Description of Artificial Sequence: Synthetic oligonucleotide; note = Description of Combined DNA/RNA Molecule: Synthetic oligonucleotide
  misc_feature 1..19: note = RNA
  misc_feature 20..21: note = DNA
ggtggtattcacagccaactt

SEQ ID NO: 662 - DNA, 21 bp, synthetic construct
  source 1..21: mol_type = other DNA; note = Description of Artificial Sequence: Synthetic oligonucleotide; note = Description of Combined DNA/RNA Molecule: Synthetic oligonucleotide
  misc_feature 1..19: note = RNA
  misc_feature 20..21: note = DNA
gttggctgtgaataccacctt

SEQ ID NO: 663 - DNA, 21 bp, synthetic construct
  source 1..21: mol_type = other DNA; note = Description of Artificial Sequence: Synthetic oligonucleotide; note = Description of Combined DNA/RNA Molecule: Synthetic oligonucleotide
  misc_feature 1..19: note = RNA
  misc_feature 20..21: note = DNA
gtggtattcacagccaacgtt

SEQ ID NO: 664 - DNA, 21 bp, synthetic construct
  source 1..21: mol_type = other DNA; note = Description of Artificial Sequence: Synthetic oligonucleotide; note = Description of Combined DNA/RNA Molecule: Synthetic oligonucleotide
  misc_feature 1..19: note = RNA
  misc_feature 20..21: note = DNA
cgttggctgtgaataccactt

SEQ ID NO: 665 - DNA, 21 bp, synthetic construct
  source 1..21: mol_type = other DNA; note = Description of Artificial Sequence: Synthetic oligonucleotide; note = Description of Combined DNA/RNA Molecule: Synthetic oligonucleotide
  misc_feature 1..19: note = RNA
  misc_feature 20..21: note = DNA
tggtattcacagccaacgatt

SEQ ID NO: 666 - DNA, 21 bp, synthetic construct
  source 1..21: mol_type = other DNA; note = Description of Artificial Sequence: Synthetic oligonucleotide; note = Description of Combined DNA/RNA Molecule: Synthetic oligonucleotide
  misc_feature 1..19: note = RNA
  misc_feature 20..21: note = DNA
tcgttggctgtgaataccatt

SEQ ID NO: 667 - DNA, 21 bp, synthetic construct
  source 1..21: mol_type = other DNA; note = Description of Artificial Sequence: Synthetic oligonucleotide; note = Description of Combined DNA/RNA Molecule: Synthetic oligonucleotide
  misc_feature 1..19: note = RNA
  misc_feature 20..21: note = DNA
ggtattcacagccaacgactt

SEQ ID NO: 668 - DNA, 21 bp, synthetic construct
  source 1..21: mol_type = other DNA; note = Description of Artificial Sequence: Synthetic oligonucleotide; note = Description of Combined DNA/RNA Molecule: Synthetic oligonucleotide
  misc_feature 1..19: note = RNA
  misc_feature 20..21: note = DNA
gtcgttggctgtgaatacctt

SEQ ID NO: 669 - DNA, 21 bp, synthetic construct
  source 1..21: mol_type = other DNA; note = Description of Artificial Sequence: Synthetic oligonucleotide; note = Description of Combined DNA/RNA Molecule: Synthetic oligonucleotide
  misc_feature 1..19: note = RNA
  misc_feature 20..21: note = DNA
gtattcacagccaacgacttt

SEQ ID NO: 670 - DNA, 21 bp, synthetic construct
  source 1..21: mol_type = other DNA; note = Description of Artificial Sequence: Synthetic oligonucleotide; note = Description of Combined DNA/RNA Molecule: Synthetic oligonucleotide
  misc_feature 1..19: note = RNA
  misc_feature 20..21: note = DNA
agtcgttggctgtgaatactt

SEQ ID NO: 671 - DNA, 21 bp, synthetic construct
  source 1..21: mol_type = other DNA; note = Description of Artificial Sequence: Synthetic oligonucleotide; note = Description of Combined DNA/RNA Molecule: Synthetic oligonucleotide
  misc_feature 1..19: note = RNA
  misc_feature 20..21: note = DNA
tattcacagccaacgactctt

SEQ ID NO: 672 - DNA, 21 bp, synthetic construct
  source 1..21: mol_type = other DNA; note = Description of Artificial Sequence: Synthetic oligonucleotide; note = Description of Combined DNA/RNA Molecule: Synthetic oligonucleotide
  misc_feature 1..19: note = RNA
  misc_feature 20..21: note = DNA
gagtcgttggctgtgaatatt

SEQ ID NO: 673 - DNA, 21 bp, synthetic construct
  source 1..21: mol_type = other DNA; note = Description of Artificial Sequence: Synthetic oligonucleotide; note = Description of Combined DNA/RNA Molecule: Synthetic oligonucleotide
  misc_feature 1..19: note = RNA
  misc_feature 20..21: note = DNA
tcacagccaacgactccggtt

SEQ ID NO: 674 - DNA, 21 bp, synthetic construct
  source 1..21: mol_type = other DNA; note = Description of Artificial Sequence: Synthetic oligonucleotide; note = Description of Combined DNA/RNA Molecule: Synthetic oligonucleotide
  misc_feature 1..19: note = RNA
  misc_feature 20..21: note = DNA
ccggagtcgttggctgtgatt

SEQ ID NO: 675 - DNA, 21 bp, synthetic construct
  source 1..21: mol_type = other DNA; note = Description of Artificial Sequence: Synthetic oligonucleotide; note = Description of Combined DNA/RNA Molecule: Synthetic oligonucleotide
  misc_feature 1..19: note = RNA
  misc_feature 20..21: note = DNA
ccccgccgctacaccattgtt

SEQ ID NO: 676 - DNA, 21 bp, synthetic construct
  source 1..21: mol_type = other DNA; note = Description of Artificial Sequence: Synthetic oligonucleotide; note = Description of Combined DNA/RNA Molecule: Synthetic oligonucleotide
  misc_feature 1..19: note = RNA
  misc_feature 20..21: note = DNA
caatggtgtagcggcggggtt

SEQ ID NO: 677 - DNA, 21 bp, synthetic construct
  source 1..21: mol_type = other DNA; note = Description of Artificial Sequence: Synthetic oligonucleotide; note = Description of Combined DNA/RNA Molecule: Synthetic oligonucleotide
  misc_feature 1..19: note = RNA
  misc_feature 20..21: note = DNA
gaagtccactcattcttggtt

SEQ ID NO: 678 - DNA, 21 bp, synthetic construct
  source 1..21: mol_type = other DNA; note = Description of Artificial Sequence: Synthetic oligonucleotide; note = Description of Combined DNA/RNA Molecule: Synthetic oligonucleotide
  misc_feature 1..19: note = RNA
  misc_feature 20..21: note = DNA
ccaagaatgagtggacttctt

SEQ ID NO: 679 - DNA, 21 bp, synthetic construct
  source 1..21: mol_type = other DNA; note = Description of Artificial Sequence: Synthetic oligonucleotide; note = Description of Combined DNA/RNA Molecule: Synthetic oligonucleotide
  misc_feature 1..19: note = RNA
  misc_feature 20..21: note = DNA
ccctgctgagcccctactctt

SEQ ID NO: 680 - DNA, 21 bp, synthetic construct
  source 1..21: mol_type = other DNA; note = Description of Artificial Sequence: Synthetic oligonucleotide; note = Description of Combined DNA/RNA Molecule: Synthetic oligonucleotide
  misc_feature 1..19: note = RNA
  misc_feature 20..21: note = DNA
gagtaggggctcagcagggtt

SEQ ID NO: 681 - DNA, 21 bp, synthetic construct
  source 1..21: mol_type = other DNA; note = Description of Artificial Sequence: Synthetic oligonucleotide; note = Description of Combined DNA/RNA Molecule: Synthetic oligonucleotide
  misc_feature 1..19: note = RNA
  misc_feature 20..21: note = DNA
ctgagcccctactcctatttt

SEQ ID NO: 682 - DNA, 21 bp, synthetic construct
  source 1..21: mol_type = other DNA; note = Description of Artificial Sequence: Synthetic oligonucleotide; note = Description of Combined DNA/RNA Molecule: Synthetic oligonucleotide
  misc_feature 1..19: note = RNA
  misc_feature 20..21: note = DNA
aataggagtaggggctcagtt

SEQ ID NO: 683 - DNA, 21 bp, synthetic construct
  source 1..21: mol_type = other DNA; note = Description of Artificial Sequence: Synthetic oligonucleotide; note = Description of Combined DNA/RNA Molecule: Synthetic oligonucleotide
  misc_feature 1..19: note = RNA
  misc_feature 20..21: note = DNA
tgagcccctactcctattctt

SEQ ID NO: 684 - DNA, 21 bp, synthetic construct
  source 1..21: mol_type = other DNA; note = Description of Artificial Sequence: Synthetic oligonucleotide; note = Description of Combined DNA/RNA Molecule: Synthetic oligonucleotide
  misc_feature 1..19: note = RNA
  misc_feature 20..21: note = DNA
gaataggagtaggggctcatt

SEQ ID NO: 685 - DNA, 21 bp, synthetic construct
  source 1..21: mol_type = other DNA; note = Description of Artificial Sequence: Synthetic oligonucleotide; note = Description of Combined DNA/RNA Molecule: Synthetic oligonucleotide
  misc_feature 1..19: note = RNA
  misc_feature 20..21: note = DNA
cccctactcctattccacctt

SEQ ID NO: 686 - DNA, 21 bp, synthetic construct
  source 1..21: mol_type = other DNA; note = Description of Artificial Sequence: Synthetic oligonucleotide; note = Description of Combined DNA/RNA Molecule: Synthetic oligonucleotide
  misc_feature 1..19: note = RNA
  misc_feature 20..21: note = DNA
ggtggaataggagtaggggtt

SEQ ID NO: 687 - DNA, 21 bp, synthetic construct
  source 1..21: mol_type = other DNA; note = Description of Artificial Sequence: Synthetic oligonucleotide; note = Description of Combined DNA/RNA Molecule: Synthetic oligonucleotide
  misc_feature 1..19: note = RNA
  misc_feature 20..21: note = DNA
ctactcctattccaccacgtt

SEQ ID NO: 688 - DNA, 21 bp, synthetic construct
  source 1..21: mol_type = other DNA; note = Description of Artificial Sequence: Synthetic oligonucleotide; note = Description of Combined DNA/RNA Molecule: Synthetic oligonucleotide
  misc_feature 1..19: note = RNA
  misc_feature 20..21: note = DNA
cgtggtggaataggagtagtt

SEQ ID NO: 689 - DNA, 21 bp, synthetic construct
  source 1..21: mol_type = other DNA; note = Description of Artificial Sequence: Synthetic oligonucleotide; note = Description of Combined DNA/RNA Molecule: Synthetic oligonucleotide
  misc_feature 1..19: note = RNA
  misc_feature 20..21: note = DNA
tactcctattccaccacggtt

SEQ ID NO: 690 - DNA, 21 bp, synthetic construct
  source 1..21: mol_type = other DNA; note = Description of Artificial Sequence: Synthetic oligonucleotide; note = Description of Combined DNA/RNA Molecule: Synthetic oligonucleotide
  misc_feature 1..19: note = RNA
  misc_feature 20..21: note = DNA
ccgtggtggaataggagtatt

SEQ ID NO: 691 - DNA, 21 bp, synthetic construct
  source 1..21: mol_type = other DNA; note = Description of Artificial Sequence: Synthetic oligonucleotide; note = Description of Combined DNA/RNA Molecule: Synthetic oligonucleotide
  misc_feature 1..19: note = RNA
  misc_feature 20..21: note = DNA
actcctattccaccacggctt

SEQ ID NO: 692 - DNA, 21 bp, synthetic construct
  source 1..21: mol_type = other DNA; note = Description of Artificial Sequence: Synthetic oligonucleotide; note = Description of Combined DNA/RNA Molecule: Synthetic oligonucleotide
  misc_feature 1..19: note = RNA
  misc_feature 20..21: note = DNA
gccgtggtggaataggagttt

SEQ ID NO: 693 - DNA, 21 bp, synthetic construct
  source 1..21: mol_type = other DNA; note = Description of Artificial Sequence: Synthetic oligonucleotide; note = Description of Combined DNA/RNA Molecule: Synthetic oligonucleotide
  misc_feature 1..19: note = RNA
  misc_feature 20..21: note = DNA
tcctattccaccacggctgtt

SEQ ID NO: 694 - DNA, 21 bp, synthetic construct
  source 1..21: mol_type = other DNA; note = Description of Artificial Sequence: Synthetic oligonucleotide; note = Description of Combined DNA/RNA Molecule: Synthetic oligonucleotide
  misc_feature 1..19: note = RNA
  misc_feature 20..21: note = DNA
cagccgtggtggaataggatt

SEQ ID NO: 695 - DNA, 21 bp, synthetic construct
  source 1..21: mol_type = other DNA; note = Description of Artificial Sequence: Synthetic oligonucleotide; note = Description of Combined DNA/RNA Molecule: Synthetic oligonucleotide
  misc_feature 1..19: note = RNA
  misc_feature 20..21: note = DNA
tattccaccacggctgtcgtt

SEQ ID NO: 696 - DNA, 21 bp, synthetic construct
  source 1..21: mol_type = other DNA; note = Description of Artificial Sequence: Synthetic oligonucleotide; note = Description of Combined DNA/RNA Molecule: Synthetic oligonucleotide
  misc_feature 1..19: note = RNA
  misc_feature 20..21: note = DNA
cgacagccgtggtggaatatt

SEQ ID NO: 697 - DNA, 21 bp, synthetic construct
  source 1..21: mol_type = other DNA; note = Description of Artificial Sequence: Synthetic oligonucleotide; note = Description of Combined DNA/RNA Molecule: Synthetic oligonucleotide
  misc_feature 1..19: note = RNA
  misc_feature 20..21: note = DNA
attccaccacggctgtcgttt

SEQ ID NO: 698 - DNA, 21 bp, synthetic construct
  source 1..21: mol_type = other DNA; note = Description of Artificial Sequence: Synthetic oligonucleotide; note = Description of Combined DNA/RNA Molecule: Synthetic oligonucleotide
  misc_feature 1..19: note = RNA
  misc_feature 20..21: note = DNA
acgacagccgtggtggaattt

SEQ ID NO: 699 - DNA, 21 bp, synthetic construct
  source 1..21: mol_type = other DNA; note = Description of Artificial Sequence: Synthetic oligonucleotide; note = Description of Combined DNA/RNA Molecule: Synthetic oligonucleotide
  misc_feature 1..19: note = RNA
  misc_feature 20..21: note = DNA
caccacggctgtcgtcacctt

SEQ ID NO: 700 - DNA, 21 bp, synthetic construct
  source 1..21: mol_type = other DNA; note = Description of Artificial Sequence: Synthetic oligonucleotide; note = Description of Combined DNA/RNA Molecule: Synthetic oligonucleotide
  misc_feature 1..19: note = RNA
  misc_feature 20..21: note = DNA
ggtgacgacagccgtggtgtt

SEQ ID NO: 701 - DNA, 21 bp, synthetic construct
  source 1..21: mol_type = other DNA; note = Description of Artificial Sequence: Synthetic oligonucleotide; note = Description of Combined DNA/RNA Molecule: Synthetic oligonucleotide
  misc_feature 1..19: note = RNA
  misc_feature 20..21: note = DNA
accacggctgtcgtcaccatt

SEQ ID NO: 702 - DNA, 21 bp, synthetic construct
  source 1..21: mol_type = other DNA; note = Description of Artificial Sequence: Synthetic oligonucleotide; note = Description of Combined DNA/RNA Molecule: Synthetic oligonucleotide
  misc_feature 1..19: note = RNA
  misc_feature 20..21: note = DNA
tggtgacgacagccgtggttt

SEQ ID NO: 703 - DNA, 21 bp, synthetic construct
  source 1..21: mol_type = other DNA; note = Description of Artificial Sequence: Synthetic oligonucleotide; note = Description of Combined DNA/RNA Molecule: Synthetic oligonucleotide
  misc_feature 1..19: note = RNA
  misc_feature 20..21: note = DNA
ccacggctgtcgtcaccaatt

SEQ ID NO: 704 - DNA, 21 bp, synthetic construct
  source 1..21: mol_type = other DNA; note = Description of Artificial Sequence: Synthetic oligonucleotide; note = Description of Combined DNA/RNA Molecule: Synthetic oligonucleotide
  misc_feature 1..19: note = RNA
  misc_feature 20..21: note = DNA
ttggtgacgacagccgtggtt

SEQ ID NO: 705 - DNA, 21 bp, synthetic construct
  source 1..21: mol_type = other DNA; note = Description of Artificial Sequence: Synthetic oligonucleotide; note = Description of Combined DNA/RNA Molecule: Synthetic oligonucleotide
  misc_feature 1..19: note = RNA
  misc_feature 20..21: note = DNA
acggctgtcgtcaccaatctt

SEQ ID NO: 706 - DNA, 21 bp, synthetic construct
  source 1..21: mol_type = other DNA; note = Description of Artificial Sequence: Synthetic oligonucleotide; note = Description of Combined DNA/RNA Molecule: Synthetic oligonucleotide
  misc_feature 1..19: note = RNA
  misc_feature 20..21: note = DNA
gattggtgacgacagccgttt

SEQ ID NO: 707 - DNA, 21 bp, synthetic construct
  source 1..21: mol_type = other DNA; note = Description of Artificial Sequence: Synthetic oligonucleotide; note = Description of Combined DNA/RNA Molecule: Synthetic oligonucleotide
  misc_feature 1..19: note = RNA
  misc_feature 20..21: note = DNA
cggctgtcgtcaccaatcctt

SEQ ID NO: 708 - DNA, 21 bp, synthetic construct
  source 1..21: mol_type = other DNA; note = Description of Artificial Sequence: Synthetic oligonucleotide; note = Description of Combined DNA/RNA Molecule: Synthetic oligonucleotide
  misc_feature 1..19: note = RNA
  misc_feature 20..21: note = DNA
ggattggtgacgacagccgtt

SEQ ID NO: 709 - DNA, 21 bp, synthetic construct
  source 1..21: mol_type = other DNA; note = Description of Artificial Sequence: Synthetic oligonucleotide; note = Description of Combined DNA/RNA Molecule: Synthetic oligonucleotide
  misc_feature 1..19: note = RNA
  misc_feature 20..21: note = DNA
cgtcaccaatcccaaggaatt

SEQ ID NO: 710 - DNA, 21 bp, synthetic construct
  source 1..21: mol_type = other DNA; note = Description of Artificial Sequence: Synthetic oligonucleotide; note = Description of Combined DNA/RNA Molecule: Synthetic oligonucleotide
  misc_feature 1..19: note = RNA
  misc_feature 20..21: note = DNA
ttccttgggattggtgacgtt

SEQ ID NO: 711 - DNA, 21 bp, synthetic construct
  source 1..21: mol_type = other DNA; note = Description of Artificial Sequence: Synthetic oligonucleotide; note = Description of Combined DNA/RNA Molecule: Synthetic oligonucleotide
  misc_feature 1..19: note = RNA
  misc_feature 20..21: note = DNA
caatcccaaggaatgagggtt

SEQ ID NO: 712 - DNA, 21 bp, synthetic construct
  source 1..21: mol_type = other DNA; note = Description of Artificial Sequence: Synthetic oligonucleotide; note = Description of Combined DNA/RNA Molecule: Synthetic oligonucleotide
  misc_feature 1..19: note = RNA
  misc_feature 20..21: note = DNA
ccctcattccttgggattgtt

SEQ ID NO: 713 - DNA, 21 bp, synthetic construct
  source 1..21: mol_type = other DNA; note = Description of Artificial Sequence: Synthetic oligonucleotide; note = Description of Combined DNA/RNA Molecule: Synthetic oligonucleotide
  misc_feature 1..19: note = RNA
  misc_feature 20..21: note = DNA
cctgaaggacgagggatggtt

SEQ ID NO: 714 - DNA, 21 bp, synthetic construct
  source 1..21: mol_type = other DNA; note = Description of Artificial Sequence: Synthetic oligonucleotide; note = Description of Combined DNA/RNA Molecule: Synthetic oligonucleotide
  misc_feature 1..19: note = RNA
  misc_feature 20..21: note = DNA
ccatccctcgtccttcaggtt

SEQ ID NO: 715 - DNA, 21 bp, synthetic construct
  source 1..21: mol_type = other DNA; note = Description of Artificial Sequence: Synthetic oligonucleotide; note = Description of Combined DNA/RNA Molecule: Synthetic oligonucleotide
  misc_feature 1..19: note = RNA
  misc_feature 20..21: note = DNA
ggacgagggatgggatttctt

SEQ ID NO: 716 - DNA, 21 bp, synthetic construct
  source 1..21: mol_type = other DNA; note = Description of Artificial Sequence: Synthetic oligonucleotide; note = Description of Combined DNA/RNA Molecule: Synthetic oligonucleotide
  misc_feature 1..19: note = RNA
  misc_feature 20..21: note = DNA
gaaatcccatccctcgtcctt

SEQ ID NO: 717 - DNA, 21 bp, synthetic construct
  source 1..21: mol_type = other DNA; note = Description of Artificial Sequence: Synthetic oligonucleotide; note = Description of Combined DNA/RNA Molecule: Synthetic oligonucleotide
  misc_feature 1..19: note = RNA
  misc_feature 20..21: note = DNA
aagtccactcattcttggctt

SEQ ID NO: 718 - DNA, 21 bp, synthetic construct
  source 1..21: mol_type = other DNA; note = Description of Artificial Sequence: Synthetic oligonucleotide; note = Description of Combined DNA/RNA Molecule: Synthetic oligonucleotide
  misc_feature 1..19: note = RNA
  misc_feature 20..21: note = DNA
gccaagaatgagtggactttt

SEQ ID NO: 719 - DNA, 21 bp, synthetic construct
  source 1..21: mol_type = other DNA; note = Description of Artificial Sequence: Synthetic oligonucleotide; note = Description of Combined DNA/RNA Molecule: Synthetic oligonucleotide
  misc_feature 1..19: note = RNA
  misc_feature 20..21: note = DNA
gggatttcatgtaaccaagtt

SEQ ID NO: 720 - DNA, 21 bp, synthetic construct
  source 1..21: mol_type = other DNA; note = Description of Artificial Sequence: Synthetic oligonucleotide; note = Description of Combined DNA/RNA Molecule: Synthetic oligonucleotide
  misc_feature 1..19: note = RNA
  misc_feature 20..21: note = DNA
cttggttacatgaaatccctt

SEQ ID NO: 721 - DNA, 21 bp, synthetic construct
  source 1..21: mol_type = other DNA; note = Description of Artificial Sequence: Synthetic oligonucleotide; note = Description of Combined DNA/RNA Molecule: Synthetic oligonucleotide
  misc_feature 1..19: note = RNA
  misc_feature 20..21: note = DNA
ggatttcatgtaaccaagatt

SEQ ID NO: 722 - DNA, 21 bp, synthetic construct
  source 1..21: mol_type = other DNA; note = Description of Artificial Sequence: Synthetic oligonucleotide; note = Description of Combined DNA/RNA Molecule: Synthetic oligonucleotide
  misc_feature 1..19: note = RNA
  misc_feature 20..21: note = DNA
tcttggttacatgaaatcctt

SEQ ID NO: 723 - DNA, 21 bp, synthetic construct
  source 1..21: mol_type = other DNA; note = Description of Artificial Sequence: Synthetic oligonucleotide; note = Description of Combined DNA/RNA Molecule: Synthetic oligonucleotide
  misc_feature 1..19: note = RNA
  misc_feature 20..21: note = DNA
tcatgtaaccaagagtatttt

SEQ ID NO: 724 - DNA, 21 bp, synthetic construct
  source 1..21: mol_type = other DNA; note = Description of Artificial Sequence: Synthetic oligonucleotide; note = Description of Combined DNA/RNA Molecule: Synthetic oligonucleotide
  misc_feature 1..19: note = RNA
  misc_feature 20..21: note = DNA
aatactcttggttacatgatt

SEQ ID NO: 725 - DNA, 21 bp, synthetic construct
  source 1..21: mol_type = other DNA; note = Description of Artificial Sequence: Synthetic oligonucleotide; note = Description of Combined DNA/RNA Molecule: Synthetic oligonucleotide
  misc_feature 1..19: note = RNA
  misc_feature 20..21: note = DNA
atgtaaccaagagtattcctt

SEQ ID NO: 726 - DNA, 21 bp, synthetic construct
  source 1..21: mol_type = other DNA; note = Description of Artificial Sequence: Synthetic oligonucleotide; note = Description of Combined DNA/RNA Molecule: Synthetic oligonucleotide
  misc_feature 1..19: note = RNA
  misc_feature 20..21: note = DNA
ggaatactcttggttacattt

SEQ ID NO: 727 - DNA, 21 bp, synthetic construct
  source 1..21: mol_type = other DNA; note = Description of Artificial Sequence: Synthetic oligonucleotide; note = Description of Combined DNA/RNA Molecule: Synthetic oligonucleotide
  misc_feature 1..19: note = RNA
  misc_feature 20..21: note = DNA
tgtaaccaagagtattccatt

SEQ ID NO: 728 - DNA, 21 bp, synthetic construct
  source 1..21: mol_type = other DNA; note = Description of Artificial Sequence: Synthetic oligonucleotide; note = Description of Combined DNA/RNA Molecule: Synthetic oligonucleotide
  misc_feature 1..19: note = RNA
  misc_feature 20..21: note = DNA
tggaatactcttggttacatt

SEQ ID NO: 729 - DNA, 21 bp, synthetic construct
  source 1..21: mol_type = other DNA; note = Description of Artificial Sequence: Synthetic oligonucleotide; note = Description of Combined DNA/RNA Molecule: Synthetic oligonucleotide
  misc_feature 1..19: note = RNA
  misc_feature 20..21: note = DNA
gtaaccaagagtattccattt

SEQ ID NO: 730 - DNA, 21 bp, synthetic construct
  source 1..21: mol_type = other DNA; note = Description of Artificial Sequence: Synthetic oligonucleotide; note = Description of Combined DNA/RNA Molecule: Synthetic oligonucleotide
  misc_feature 1..19: note = RNA
  misc_feature 20..21: note = DNA
atggaatactcttggttactt

SEQ ID NO: 731 - DNA, 21 bp, synthetic construct
  source 1..21: mol_type = other DNA; note = Description of Artificial Sequence: Synthetic oligonucleotide; note = Description of Combined DNA/RNA Molecule: Synthetic oligonucleotide
  misc_feature 1..19: note = RNA
  misc_feature 20..21: note = DNA
tgccttgctggactggtattt

SEQ ID NO: 732 - DNA, 21 bp, synthetic construct
  source 1..21: mol_type = other DNA; note = Description of Artificial Sequence: Synthetic oligonucleotide; note = Description of Combined DNA/RNA Molecule: Synthetic oligonucleotide
  misc_feature 1..19: note = RNA
  misc_feature 20..21: note = DNA
ataccagtccagcaaggcatt

SEQ ID NO: 733 - DNA, 21 bp, synthetic construct
  source 1..21: mol_type = other DNA; note = Description of Artificial Sequence: Synthetic oligonucleotide; note = Description of Combined DNA/RNA Molecule: Synthetic oligonucleotide
  misc_feature 1..19: note = RNA
  misc_feature 20..21: note = DNA
taaagcagtgttttcaccttt

SEQ ID NO: 734 - DNA, 21 bp, synthetic construct
  source 1..21: mol_type = other DNA; note = Description of Artificial Sequence: Synthetic oligonucleotide; note = Description of Combined DNA/RNA Molecule: Synthetic oligonucleotide
  misc_feature 1..19: note = RNA
  misc_feature 20..21: note = DNA
aggtgaaaacactgctttatt

SEQ ID NO: 735 - DNA, 21 bp, synthetic construct
  source 1..21: mol_type = other DNA; note = Description of Artificial Sequence: Synthetic oligonucleotide; note = Description of Combined DNA/RNA Molecule: Synthetic oligonucleotide
  misc_feature 1..19: note = RNA
  misc_feature 20..21: note = DNA
gccttgctggactggtatttt

SEQ ID NO: 736 - DNA, 21 bp, synthetic construct
  source 1..21: mol_type = other DNA; note = Description of Artificial Sequence: Synthetic oligonucleotide; note = Description of Combined DNA/RNA Molecule: Synthetic oligonucleotide
  misc_feature 1..19: note = RNA
  misc_feature 20..21: note = DNA
aataccagtccagcaaggctt

SEQ ID NO: 737 - DNA, 21 bp, synthetic construct
  source 1..21: mol_type = other DNA; note = Description of Artificial Sequence: Synthetic oligonucleotide; note = Description of Combined DNA/RNA Molecule: Synthetic oligonucleotide
  misc_feature 1..19: note = RNA
  misc_feature 20..21: note = DNA
tgttttcacctcatatgcttt

SEQ ID NO: 738 - DNA, 21 bp, synthetic construct
  source 1..21: mol_type = other DNA; note = Description of Artificial Sequence: Synthetic oligonucleotide; note = Description of Combined DNA/RNA Molecule: Synthetic oligonucleotide
  misc_feature 1..19: note = RNA
  misc_feature 20..21: note = DNA
agcatatgaggtgaaaacatt

SEQ ID NO: 739 - DNA, 21 bp, synthetic construct
  source 1..21: mol_type = other DNA; note = Description of Artificial Sequence: Synthetic oligonucleotide; note = Description of Combined DNA/RNA Molecule: Synthetic oligonucleotide
  misc_feature 1..19: note = RNA
  misc_feature 20..21: note = DNA
gttttcacctcatatgctatt

SEQ ID NO: 740 - DNA, 21 bp, synthetic construct
  source 1..21: mol_type = other DNA; note = Description of Artificial Sequence: Synthetic oligonucleotide; note = Description of Combined DNA/RNA Molecule: Synthetic oligonucleotide
  misc_feature 1..19: note = RNA
  misc_feature 20..21: note = DNA
tagcatatgaggtgaaaactt

SEQ ID NO: 741 - DNA, 21 bp, synthetic construct
  source 1..21: mol_type = other DNA; note = Description of Artificial Sequence: Synthetic oligonucleotide; note = Description of Combined DNA/RNA Molecule: Synthetic oligonucleotide
  misc_feature 1..19: note = RNA
  misc_feature 20..21: note = DNA
ttttcacctcatatgctattt

SEQ ID NO: 742 - DNA, 21 bp, synthetic construct
  source 1..21: mol_type = other DNA; note = Description of Artificial Sequence: Synthetic oligonucleotide; note = Description of Combined DNA/RNA Molecule: Synthetic oligonucleotide
  misc_feature 1..19: note = RNA
  misc_feature 20..21: note = DNA
atagcatatgaggtgaaaatt

SEQ ID NO: 743 - DNA, 21 bp, synthetic construct
  source 1..21: mol_type = other DNA; note = Description of Artificial Sequence: Synthetic oligonucleotide; note = Description of Combined DNA/RNA Molecule: Synthetic oligonucleotide
  misc_feature 1..19: note = RNA
  misc_feature 20..21: note = DNA
ttcacctcatatgctatgttt

SEQ ID NO: 744 - DNA, 21 bp, synthetic construct
  source 1..21: mol_type = other DNA; note = Description of Artificial Sequence: Synthetic oligonucleotide; note = Description of Combined DNA/RNA Molecule: Synthetic oligonucleotide
  misc_feature 1..19: note = RNA
  misc_feature 20..21: note = DNA
acatagcatatgaggtgaatt

SEQ ID NO: 745 - DNA, 21 bp, synthetic construct
  source 1..21: mol_type = other DNA; note = Description of Artificial Sequence: Synthetic oligonucleotide; note = Description of Combined DNA/RNA Molecule: Synthetic oligonucleotide
  misc_feature 1..19: note = RNA
  misc_feature 20..21: note = DNA
cacctcatatgctatgttatt

SEQ ID NO: 746 - DNA, 21 bp, synthetic construct
  source 1..21: mol_type = other DNA; note = Description of Artificial Sequence: Synthetic oligonucleotide; note = Description of Combined DNA/RNA Molecule: Synthetic oligonucleotide
  misc_feature 1..19: note = RNA
  misc_feature 20..21: note = DNA
taacatagcatatgaggtgtt

SEQ ID NO: 747 - DNA, 21 bp, synthetic construct
  source 1..21: mol_type = other DNA; note = Description of Artificial Sequence: Synthetic oligonucleotide; note = Description of Combined DNA/RNA Molecule: Synthetic oligonucleotide
  misc_feature 1..19: note = RNA
  misc_feature 20..21: note = DNA
ccttgctggactggtattttt

SEQ ID NO: 748 - DNA, 21 bp, synthetic construct
  source 1..21: mol_type = other DNA; note = Description of Artificial Sequence: Synthetic oligonucleotide; note = Description of Combined DNA/RNA Molecule: Synthetic oligonucleotide
  misc_feature 1..19: note = RNA
  misc_feature 20..21: note = DNA
aaataccagtccagcaaggtt

SEQ ID NO: 749 - DNA, 21 bp, synthetic construct
  source 1..21: mol_type = other DNA; note = Description of Artificial Sequence: Synthetic oligonucleotide; note = Description of Combined DNA/RNA Molecule: Synthetic oligonucleotide
  misc_feature 1..19: note = RNA
  misc_feature 20..21: note = DNA
atatgctatgttagaagtctt

SEQ ID NO: 750 - DNA, 21 bp, synthetic construct
  source 1..21: mol_type = other DNA; note = Description of Artificial Sequence: Synthetic oligonucleotide; note = Description of Combined DNA/RNA Molecule: Synthetic oligonucleotide
  misc_feature 1..19: note = RNA
  misc_feature 20..21: note = DNA
gacttctaacatagcatattt

SEQ ID NO: 751 - DNA, 21 bp, synthetic construct
  source 1..21: mol_type = other DNA; note = Description of Artificial Sequence: Synthetic oligonucleotide; note = Description of Combined DNA/RNA Molecule: Synthetic oligonucleotide
  misc_feature 1..19: note = RNA
  misc_feature 20..21: note = DNA
tatgctatgttagaagtcctt

SEQ ID NO: 752 - DNA, 21 bp, synthetic construct
  source 1..21: mol_type = other DNA; note = Description of Artificial Sequence: Synthetic oligonucleotide; note = Description of Combined DNA/RNA Molecule: Synthetic oligonucleotide
  misc_feature 1..19: note = RNA
  misc_feature 20..21: note = DNA
ggacttctaacatagcatatt

SEQ ID NO: 753 - DNA, 21 bp, synthetic construct
  source 1..21: mol_type = other DNA; note = Description of Artificial Sequence: Synthetic oligonucleotide; note = Description of Combined DNA/RNA Molecule: Synthetic oligonucleotide
  misc_feature 1..19: note = RNA
  misc_feature 20..21: note = DNA
tgctatgttagaagtccagtt

SEQ ID NO: 754 - DNA, 21 bp, synthetic construct
  source 1..21: mol_type = other DNA; note = Description of Artificial Sequence: Synthetic oligonucleotide; note = Description of Combined DNA/RNA Molecule: Synthetic oligonucleotide
  misc_feature 1..19: note = RNA
  misc_feature 20..21: note = DNA
ctggacttctaacatagcatt

SEQ ID NO: 755 - DNA, 21 bp, synthetic construct
  source 1..21: mol_type = other DNA; note = Description of Artificial Sequence: Synthetic oligonucleotide; note = Description of Combined DNA/RNA Molecule: Synthetic oligonucleotide
  misc_feature 1..19: note = RNA
  misc_feature 20..21: note = DNA
cttgctggactggtatttgtt

SEQ ID NO: 756 - DNA, 21 bp, synthetic construct
  source 1..21: mol_type = other DNA; note = Description of Artificial Sequence: Synthetic oligonucleotide; note = Description of Combined DNA/RNA Molecule: Synthetic oligonucleotide
  misc_feature 1..19: note = RNA
  misc_feature 20..21: note = DNA
caaataccagtccagcaagtt

SEQ ID NO: 757 - DNA, 21 bp, synthetic construct
  source 1..21: mol_type = other DNA; note = Description of Artificial Sequence: Synthetic oligonucleotide; note = Description of Combined DNA/RNA Molecule: Synthetic oligonucleotide
  misc_feature 1..19: note = RNA
  misc_feature 20..21: note = DNA
agtccaggcagagacaatatt

SEQ ID NO: 758 - DNA, 22 bp, synthetic construct
  source 1..22: mol_type = other DNA; note = Description of Artificial Sequence: Synthetic oligonucleotide; note = Description of Combined DNA/RNA Molecule: Synthetic oligonucleotide
  misc_feature 1..18: note = RNA
  misc_feature 19..22: note = DNA
attgtctctgcctggacttttt

SEQ ID NO: 759 - DNA, 21 bp, synthetic construct
  source 1..21: mol_type = other DNA; note = Description of Artificial Sequence: Synthetic oligonucleotide; note = Description of Combined DNA/RNA Molecule: Synthetic oligonucleotide
  misc_feature 1..19: note = RNA
  misc_feature 20..21: note = DNA
tccaggcagagacaataaatt

SEQ ID NO: 760 - DNA, 21 bp, synthetic construct
  source 1..21: mol_type = other DNA; note = Description of Artificial Sequence: Synthetic oligonucleotide; note = Description of Combined DNA/RNA Molecule: Synthetic oligonucleotide
  misc_feature 1..19: note = RNA
  misc_feature 20..21: note = DNA
tttattgtctctgcctggatt

SEQ ID NO: 761 - DNA, 21 bp, synthetic construct
  source 1..21: mol_type = other DNA; note = Description of Artificial Sequence: Synthetic oligonucleotide; note = Description of Combined DNA/RNA Molecule: Synthetic oligonucleotide
  misc_feature 1..19: note = RNA
  misc_feature 20..21: note = DNA
gtgaaaggcacttttcatttt

SEQ ID NO: 762 - DNA, 21 bp, synthetic construct
  source 1..21: mol_type = other DNA; note = Description of Artificial Sequence: Synthetic oligonucleotide; note = Description of Combined DNA/RNA Molecule: Synthetic oligonucleotide
  misc_feature 1..19: note = RNA
  misc_feature 20..21: note = DNA
aatgaaaagtgcctttcactt

SEQ ID NO: 763 - DNA, 21 bp, synthetic construct
  source 1..21: mol_type = other DNA; note = Description of Artificial Sequence: Synthetic oligonucleotide; note = Description of Combined DNA/RNA Molecule: Synthetic oligonucleotide
  misc_feature 1..19: note = RNA
  misc_feature 20..21: note = DNA
tggactggtatttgtgtcttt

SEQ ID NO: 764 - DNA, 21 bp, synthetic construct
  source 1..21: mol_type = other DNA; note = Description of Artificial Sequence: Synthetic oligonucleotide; note = Description of Combined DNA/RNA Molecule: Synthetic oligonucleotide
  misc_feature 1..19: note = RNA
  misc_feature 20..21: note = DNA
agacacaaataccagtccatt

SEQ ID NO: 765 - DNA, 21 bp, synthetic construct
  source 1..21: mol_type = other DNA; note = Description of Artificial Sequence: Synthetic oligonucleotide; note = Description of Combined DNA/RNA Molecule: Synthetic oligonucleotide
  misc_feature 1..19: note = RNA
  misc_feature 20..21: note = DNA
gtctgaggctggccctacgtt

SEQ ID NO: 766 - DNA, 21 bp, synthetic construct
  source 1..21: mol_type = other DNA; note = Description of Artificial Sequence: Synthetic oligonucleotide; note = Description of Combined DNA/RNA Molecule: Synthetic oligonucleotide
  misc_feature 1..19: note = RNA
  misc_feature 20..21: note = DNA
cgtagggccagcctcagactt

SEQ ID NO: 767 - DNA, 21 bp, synthetic construct
  source 1..21: mol_type = other DNA; note = Description of Artificial Sequence: Synthetic oligonucleotide; note = Description of Combined DNA/RNA Molecule: Synthetic oligonucleotide
  misc_feature 1..19: note = RNA
  misc_feature 20..21: note = DNA
ctgaggctggccctacgggtt

SEQ ID NO: 768 - DNA, 21 bp, synthetic construct
  source 1..21: mol_type = other DNA; note = Description of Artificial Sequence: Synthetic oligonucleotide; note = Description of Combined DNA/RNA Molecule: Synthetic oligonucleotide
  misc_feature 1..19: note = RNA
  misc_feature 20..21: note = DNA
cccgtagggccagcctcagtt

SEQ ID NO: 769 - DNA, 21 bp, synthetic construct
  source 1..21: mol_type = other DNA; note = Description of Artificial Sequence: Synthetic oligonucleotide; note = Description of Combined DNA/RNA Molecule: Synthetic oligonucleotide
  misc_feature 1..19: note = RNA
  misc_feature 20..21: note = DNA
gaggctggccctacgggcatt

SEQ ID NO: 770 - DNA, 21 bp, synthetic construct
  source 1..21: mol_type = other DNA; note = Description of Artificial Sequence: Synthetic oligonucleotide; note = Description of Combined DNA/RNA Molecule: Synthetic oligonucleotide
  misc_feature 1..19: note = RNA
  misc_feature 20..21: note = DNA
tgcccgtagggccagcctctt

SEQ ID NO: 771 - DNA, 21 bp, synthetic construct
  source 1..21: mol_type = other DNA; note = Description of Artificial Sequence: Synthetic oligonucleotide; note = Description of Combined DNA/RNA Molecule: Synthetic oligonucleotide
  misc_feature 1..19: note = RNA
  misc_feature 20..21: note = DNA
aggctggccctacgggcactt

SEQ ID NO: 772 - DNA, 21 bp, synthetic construct
  source 1..21: mol_type = other DNA; note = Description of Artificial Sequence: Synthetic oligonucleotide; note = Description of Combined DNA/RNA Molecule: Synthetic oligonucleotide
  misc_feature 1..19: note = RNA
  misc_feature 20..21: note = DNA
gtgcccgtagggccagccttt

SEQ ID NO: 773 - DNA, 21 bp, synthetic construct
  source 1..21: mol_type = other DNA; note = Description of Artificial Sequence: Synthetic oligonucleotide; note = Description of Combined DNA/RNA Molecule: Synthetic oligonucleotide
  misc_feature 1..19: note = RNA
  misc_feature 20..21: note = DNA
gctggccctacgggcaccgtt

SEQ ID NO: 774 - DNA, 21 bp, synthetic construct
  source 1..21: mol_type = other DNA; note = Description of Artificial Sequence: Synthetic oligonucleotide; note = Description of Combined DNA/RNA Molecule: Synthetic oligonucleotide
  misc_feature 1..19: note = RNA
  misc_feature 20..21: note = DNA
cggtgcccgtagggccagctt

SEQ ID NO: 775 - DNA, 21 bp, synthetic construct
  source 1..21: mol_type = other DNA; note = Description of Artificial Sequence: Synthetic oligonucleotide; note = Description of Combined DNA/RNA Molecule: Synthetic oligonucleotide
  misc_feature 1..19: note = RNA
  misc_feature 20..21: note = DNA
ctggccctacgggcaccggtt

SEQ ID NO: 776 - DNA, 21 bp, synthetic construct
  source 1..21: mol_type = other DNA; note = Description of Artificial Sequence: Synthetic oligonucleotide; note = Description of Combined DNA/RNA Molecule: Synthetic oligonucleotide
  misc_feature 1..19: note = RNA
  misc_feature 20..21: note = DNA
ccggtgcccgtagggccagtt

SEQ ID NO: 777 - DNA, 21 bp, synthetic construct
  source 1..21: mol_type = other DNA; note = Description of Artificial Sequence: Synthetic oligonucleotide; note = Description of Combined DNA/RNA Molecule: Synthetic oligonucleotide
  misc_feature 1..19: note = RNA
  misc_feature 20..21: note = DNA
ggccctacgggcaccggtgtt

SEQ ID NO: 778 - DNA, 21 bp, synthetic construct
  source 1..21: mol_type = other DNA; note = Description of Artificial Sequence: Synthetic oligonucleotide; note = Description of Combined DNA/RNA Molecule: Synthetic oligonucleotide
  misc_feature 1..19: note = RNA
  misc_feature 20..21: note = DNA
caccggtgcccgtagggcctt

SEQ ID NO: 779 - DNA, 21 bp, synthetic construct
  source 1..21: mol_type = other DNA; note = Description of Artificial Sequence: Synthetic oligonucleotide; note = Description of Combined DNA/RNA Molecule: Synthetic oligonucleotide
  misc_feature 1..19: note = RNA
  misc_feature 20..21: note = DNA
ccactcattcttggcaggatt

SEQ ID NO: 780 - DNA, 21 bp, synthetic construct
  source 1..21: mol_type = other DNA; note = Description of Artificial Sequence: Synthetic oligonucleotide; note = Description of Combined DNA/RNA Molecule: Synthetic oligonucleotide
  misc_feature 1..19: note = RNA
  misc_feature 20..21: note = DNA
tcctgccaagaatgagtggtt

SEQ ID NO: 781 - DNA, 21 bp, synthetic construct
  source 1..21: mol_type = other DNA; note = Description of Artificial Sequence: Synthetic oligonucleotide; note = Description of Combined DNA/RNA Molecule: Synthetic oligonucleotide
  misc_feature 1..19: note = RNA
  misc_feature 20..21: note = DNA
cctacgggcaccggtgaattt

SEQ ID NO: 782 - DNA, 21 bp, synthetic construct
  source 1..21: mol_type = other DNA; note = Description of Artificial Sequence: Synthetic oligonucleotide; note = Description of Combined DNA/RNA Molecule: Synthetic oligonucleotide
  misc_feature 1..19: note = RNA
  misc_feature 20..21: note = DNA
attcaccggtgcccgtaggtt

SEQ ID NO: 783 - DNA, 21 bp, synthetic construct
  source 1..21: mol_type = other DNA; note = Description of Artificial Sequence: Synthetic oligonucleotide; note = Description of Combined DNA/RNA Molecule: Synthetic oligonucleotide
  misc_feature 1..19: note = RNA
  misc_feature 20..21: note = DNA
ctacgggcaccggtgaatctt

SEQ ID NO: 784 - DNA, 21 bp, synthetic construct
  source 1..21: mol_type = other DNA; note = Description of Artificial Sequence: Synthetic oligonucleotide; note = Description of Combined DNA/RNA Molecule: Synthetic oligonucleotide
  misc_feature 1..19: note = RNA
  misc_feature 20..21: note = DNA
gattcaccggtgcccgtagtt

SEQ ID NO: 785 - DNA, 21 bp, synthetic construct
  source 1..21: mol_type = other DNA; note = Description of Artificial Sequence: Synthetic oligonucleotide; note = Description of Combined DNA/RNA Molecule: Synthetic oligonucleotide
  misc_feature 1..19: note = RNA
  misc_feature 20..21: note = DNA
tacgggcaccggtgaatcctt

SEQ ID NO: 786 - DNA, 21 bp, synthetic construct
  source 1..21: mol_type = other DNA; note = Description of Artificial Sequence: Synthetic oligonucleotide; note = Description of Combined DNA/RNA Molecule: Synthetic oligonucleotide
  misc_feature 1..19: note = RNA
  misc_feature 20..21: note = DNA
ggattcaccggtgcccgtatt

SEQ ID NO: 787 - DNA, 21 bp, synthetic construct
  source 1..21: mol_type = other DNA; note = Description of Artificial Sequence: Synthetic oligonucleotide; note = Description of Combined DNA/RNA Molecule: Synthetic oligonucleotide
  misc_feature 1..19: note = RNA
  misc_feature 20..21: note = DNA
acgggcaccggtgaatccatt

SEQ ID NO: 788 - DNA, 21 bp, synthetic construct
  source 1..21: mol_type = other DNA; note = Description of Artificial Sequence: Synthetic oligonucleotide; note = Description of Combined DNA/RNA Molecule: Synthetic oligonucleotide
  misc_feature 1..19: note = RNA
  misc_feature 20..21: note = DNA
tggattcaccggtgcccgttt

SEQ ID NO: 789 - DNA, 21 bp, synthetic construct
  source 1..21: mol_type = other DNA; note = Description of Artificial Sequence: Synthetic oligonucleotide; note = Description of Combined DNA/RNA Molecule: Synthetic oligonucleotide
  misc_feature 1..19: note = RNA
  misc_feature 20..21: note = DNA
gcaccggtgaatccaagtgtt

SEQ ID NO: 790 - DNA, 21 bp, synthetic construct
  source 1..21: mol_type = other DNA; note = Description of Artificial Sequence: Synthetic oligonucleotide; note = Description of Combined DNA/RNA Molecule: Synthetic oligonucleotide
  misc_feature 1..19: note = RNA
  misc_feature 20..21: note = DNA
cacttggattcaccggtgctt

SEQ ID NO: 791 - DNA, 21 bp, synthetic construct
  source 1..21: mol_type = other DNA; note = Description of Artificial Sequence: Synthetic oligonucleotide; note = Description of Combined DNA/RNA Molecule: Synthetic oligonucleotide
  misc_feature 1..19: note = RNA
  misc_feature 20..21: note = DNA
caccggtgaatccaagtgttt

SEQ ID NO: 792 - DNA, 21 bp, synthetic construct
  source 1..21: mol_type = other DNA; note = Description of Artificial Sequence: Synthetic oligonucleotide; note = Description of Combined DNA/RNA Molecule: Synthetic oligonucleotide
  misc_feature 1..19: note = RNA
  misc_feature 20..21: note = DNA
acacttggattcaccggtgtt

SEQ ID NO: 793 - DNA, 21 bp, synthetic construct
  source 1..21: mol_type = other DNA; note = Description of Artificial Sequence: Synthetic oligonucleotide; note = Description of Combined DNA/RNA Molecule: Synthetic oligonucleotide
  misc_feature 1..19: note = RNA
  misc_feature 20..21: note = DNA
tgtggccatgcatgtgttctt

SEQ ID NO: 794 - DNA, 21 bp, synthetic construct
  source 1..21: mol_type = other DNA; note = Description of Artificial Sequence: Synthetic oligonucleotide; note = Description of Combined DNA/RNA Molecule: Synthetic oligonucleotide
  misc_feature 1..19: note = RNA
  misc_feature 20..21: note = DNA
gaacacatgcatggccacatt

SEQ ID NO: 795 - DNA, 21 bp, synthetic construct
  source 1..21: mol_type = other DNA; note = Description of Artificial Sequence: Synthetic oligonucleotide; note = Description of Combined DNA/RNA Molecule: Synthetic oligonucleotide
  misc_feature 1..19: note = RNA
  misc_feature 20..21: note = DNA
gtggccatgcatgtgttcatt

SEQ ID NO: 796 - DNA, 21 bp, synthetic construct
  source 1..21: mol_type = other DNA; note = Description of Artificial Sequence: Synthetic oligonucleotide; note = Description of Combined DNA/RNA Molecule: Synthetic oligonucleotide
  misc_feature 1..19: note = RNA
  misc_feature 20..21: note = DNA
tgaacacatgcatggccactt

SEQ ID NO: 797 - DNA, 21 bp, synthetic construct
  source 1..21: mol_type = other DNA; note = Description of Artificial Sequence: Synthetic oligonucleotide; note = Description of Combined DNA/RNA Molecule: Synthetic oligonucleotide
  misc_feature 1..19: note = RNA
  misc_feature 20..21: note = DNA
gccatgcatgtgttcagaatt

SEQ ID NO: 798 - DNA, 21 bp, synthetic construct
  source 1..21: mol_type = other DNA; note = Description of Artificial Sequence: Synthetic oligonucleotide; note = Description of Combined DNA/RNA Molecule: Synthetic oligonucleotide
  misc_feature 1..19: note = RNA
  misc_feature 20..21: note = DNA
ttctgaacacatgcatggctt

SEQ ID NO: 799 - DNA, 21 bp, synthetic construct
  source 1..21: mol_type = other DNA; note = Description of Artificial Sequence: Synthetic oligonucleotide; note = Description of Combined DNA/RNA Molecule: Synthetic oligonucleotide
  misc_feature 1..19: note = RNA
  misc_feature 20..21: note = DNA
tattccaccacggctgtcatt

SEQ ID NO: 800 - DNA, 21 bp, synthetic construct
  source 1..21: mol_type = other DNA; note = Description of Artificial Sequence: Synthetic oligonucleotide; note = Description of Combined DNA/RNA Molecule: Synthetic oligonucleotide
  misc_feature 1..19: note = RNA
  misc_feature 20..21: note = DNA
tgacagccgtggtggaatatt

SEQ ID NO: 801 - DNA, 21 bp, synthetic construct
  source 1..21: mol_type = other DNA; note = Description of Artificial Sequence: Synthetic oligonucleotide; note = Description of Combined DNA/RNA Molecule: Synthetic oligonucleotide
  misc_feature 1..19: note = RNA
  misc_feature 20..21: note = DNA
gtcatcaccaatcccaaggtt

SEQ ID NO: 802 - DNA, 21 bp, synthetic construct
  source 1..21: mol_type = other DNA; note = Description of Artificial Sequence: Synthetic oligonucleotide; note = Description of Combined DNA/RNA Molecule: Synthetic oligonucleotide
  misc_feature 1..19: note = RNA
  misc_feature 20..21: note = DNA
ccttgggattggtgatgactt

SEQ ID NO: 803 - DNA, 21 bp, synthetic construct
  source 1..21: mol_type = other DNA; note = Description of Artificial Sequence: Synthetic oligonucleotide; note = Description of Combined DNA/RNA Molecule: Synthetic oligonucleotide
  misc_feature 1..19: note = RNA
  misc_feature 20..21: note = DNA
gtcctctgatggtcaaagttt

SEQ ID NO: 804 - DNA, 21 bp, synthetic construct
  source 1..21: mol_type = other DNA; note = Description of Artificial Sequence: Synthetic oligonucleotide; note = Description of Combined DNA/RNA Molecule: Synthetic oligonucleotide
  misc_feature 1..19: note = RNA
  misc_feature 20..21: note = DNA
actttgaccatcagaggactt

SEQ ID NO: 805 - DNA, 21 bp, synthetic construct
  source 1..21: mol_type = other DNA; note = Description of Artificial Sequence: Synthetic oligonucleotide; note = Description of Combined DNA/RNA Molecule: Synthetic oligonucleotide
  misc_feature 1..19: note = RNA
  misc_feature 20..21: note = DNA
gatggtcaaagttctagattt

SEQ ID NO: 806 - DNA, 21 bp, synthetic construct
  source 1..21: mol_type = other DNA; note = Description of Artificial Sequence: Synthetic oligonucleotide; note = Description of Combined DNA/RNA Molecule: Synthetic oligonucleotide
  misc_feature 1..19: note = RNA
  misc_feature 20..21: note = DNA
atctagaactttgaccatctt

SEQ ID NO: 807 - DNA, 21 bp, synthetic construct
  source 1..21: mol_type = other DNA; note = Description of Artificial Sequence: Synthetic oligonucleotide; note = Description of Combined DNA/RNA Molecule: Synthetic oligonucleotide
  misc_feature 1..19: note = RNA
  misc_feature 20..21: note = DNA
atgctgtccgaggcagtcctt

SEQ ID NO: 808 - DNA, 21 bp, synthetic construct
  source 1..21: mol_type = other DNA; note = Description of Artificial Sequence: Synthetic oligonucleotide; note = Description of Combined DNA/RNA Molecule: Synthetic oligonucleotide
  misc_feature 1..19: note = RNA
  misc_feature 20..21: note = DNA
ggactgcctcggacagcattt

SEQ ID NO: 809 - DNA, 21 bp, synthetic construct
  source 1..21: mol_type = other DNA; note = Description of Artificial Sequence: Synthetic oligonucleotide; note = Description of Combined DNA/RNA Molecule: Synthetic oligonucleotide
  misc_feature 1..19: note = RNA
  misc_feature 20..21: note = DNA
ccgtgcatgtgttcagaaatt

SEQ ID NO: 810 - DNA, 21 bp, synthetic construct
  source 1..21: mol_type = other DNA; note = Description of Artificial Sequence: Synthetic oligonucleotide; note = Description of Combined DNA/RNA Molecule: Synthetic oligonucleotide
  misc_feature 1..19: note = RNA
  misc_feature 20..21: note = DNA
tttctgaacacatgcacggtt

SEQ ID NO: 811 - DNA, 21 bp, synthetic construct
  source 1..21: mol_type = other DNA; note = Description of Artificial Sequence: Synthetic oligonucleotide; note = Description of Combined DNA/RNA Molecule: Synthetic oligonucleotide
  misc_feature 1..19: note = RNA
  misc_feature 20..21: note = DNA
agtctggagagctgcatggtt

SEQ ID NO: 812 - DNA, 21 bp, synthetic construct
  source 1..21: mol_type = other DNA; note = Description of Artificial Sequence: Synthetic oligonucleotide; note = Description of Combined DNA/RNA Molecule: Synthetic oligonucleotide
  misc_feature 1..19: note = RNA
  misc_feature 20..21: note = DNA
ccatgcagctctccagacttt

SEQ ID NO: 813 - DNA, 21 bp, synthetic construct
  source 1..21: mol_type = other DNA; note = Description of Artificial Sequence: Synthetic oligonucleotide; note = Description of Combined DNA/RNA Molecule: Synthetic oligonucleotide
  misc_feature 1..19: note = RNA
  misc_feature 20..21: note = DNA
catgggctcacaactgaggtt

SEQ ID NO: 814 - DNA, 21 bp, synthetic construct
  source 1..21: mol_type = other DNA; note = Description of Artificial Sequence: Synthetic oligonucleotide; note = Description of Combined DNA/RNA Molecule: Synthetic oligonucleotide
  misc_feature 1..19: note = RNA
  misc_feature 20..21: note = DNA
cctcagttgtgagcccatgtt

SEQ ID NO: 815 - DNA, 21 bp, synthetic construct
  source 1..21: mol_type = other DNA; note = Description of Artificial Sequence: Synthetic oligonucleotide; note = Description of Combined DNA/RNA Molecule: Synthetic oligonucleotide
  misc_feature 1..19: note = RNA
  misc_feature 20..21: note = DNA
tctcatcgtctgctcctcctt

SEQ ID NO: 816 - DNA, 21 bp, synthetic construct
  source 1..21: mol_type = other DNA; note = Description of Artificial Sequence: Synthetic oligonucleotide; note = Description of Combined DNA/RNA Molecule: Synthetic oligonucleotide
  misc_feature 1..19: note = RNA
  misc_feature 20..21: note = DNA
ggaggagcagacgatgagatt

SEQ ID NO: 817 - DNA, 21 bp, synthetic construct
  source 1..21: mol_type = other DNA; note = Description of Artificial Sequence: Synthetic oligonucleotide; note = Description of Combined DNA/RNA Molecule: Synthetic oligonucleotide
  misc_feature 1..19: note = RNA
  misc_feature 20..21: note = DNA
ccccattccatgagcatgctt

SEQ ID NO: 818 - DNA, 21 bp, synthetic construct
  source 1..21: mol_type = other DNA; note = Description of Artificial Sequence: Synthetic oligonucleotide; note = Description of Combined DNA/RNA Molecule: Synthetic oligonucleotide
  misc_feature 1..19: note = RNA
  misc_feature 20..21: note = DNA
gcatgctcatggaatggggtt

SEQ ID NO: 819 - DNA, 21 bp, synthetic construct
  source 1..21: mol_type = other DNA; note = Description of Artificial Sequence: Synthetic oligonucleotide; note = Description of Combined DNA/RNA Molecule: Synthetic oligonucleotide
  misc_feature 1..19: note = RNA
  misc_feature 20..21: note = DNA
gcccctactcctattccactt

SEQ ID NO: 820 - DNA, 21 bp, synthetic construct
  source 1..21: mol_type = other DNA; note = Description of Artificial Sequence: Synthetic oligonucleotide; note = Description of Combined DNA/RNA Molecule: Synthetic oligonucleotide
  misc_feature 1..19: note = RNA
  misc_feature 20..21: note = DNA
gtggaataggagtaggggctt

SEQ ID NO: 821 - DNA, 21 bp, synthetic construct
  source 1..21: mol_type = other DNA; note = Description of Artificial Sequence: Synthetic oligonucleotide; note = Description of Combined DNA/RNA Molecule: Synthetic oligonucleotide
  misc_feature 1..19: note = RNA
  misc_feature 20..21: note = DNA
ctattccaccacggctgtctt

SEQ ID NO: 822 - DNA, 21 bp, synthetic construct
  source 1..21: mol_type = other DNA; note = Description of Artificial Sequence: Synthetic oligonucleotide; note = Description of Combined DNA/RNA Molecule: Synthetic oligonucleotide
  misc_feature 1..19: note = RNA
  misc_feature 20..21: note = DNA
gacagccgtggtggaatagtt

SEQ ID NO: 823 - DNA, 21 bp, synthetic construct
  source 1..21: mol_type = other DNA; note = Description of Artificial Sequence: Synthetic oligonucleotide; note = Description of Combined DNA/RNA Molecule: Synthetic oligonucleotide
  misc_feature 1..19: note = RNA
  misc_feature 20..21: note = DNA
cacggctgtcgtcaccaattt

SEQ ID NO: 824 - DNA, 21 bp, synthetic construct
  source 1..21: mol_type = other DNA; note = Description of Artificial Sequence: Synthetic oligonucleotide; note = Description of Combined DNA/RNA Molecule: Synthetic oligonucleotide
  misc_feature 1..19: note = RNA
  misc_feature 20..21: note = DNA
attggtgacgacagccgtgtt

SEQ ID NO: 825 - DNA, 21 bp, synthetic construct
  source 1..21: mol_type = other DNA; note = Description of Artificial Sequence: Synthetic oligonucleotide; note = Description of Combined DNA/RNA Molecule: Synthetic oligonucleotide
  misc_feature 1..19: note = RNA
  misc_feature 20..21: note = DNA
aggacgagggatgggattttt

SEQ ID NO: 826 - DNA, 21 bp, synthetic construct
  source 1..21: mol_type = other DNA; note = Description of Artificial Sequence: Synthetic oligonucleotide; note = Description of Combined DNA/RNA Molecule: Synthetic oligonucleotide
  misc_feature 1..19: note = RNA
  misc_feature 20..21: note = DNA
aaatcccatccctcgtccttt

SEQ ID NO: 827 - DNA, 21 bp, synthetic construct
  source 1..21: mol_type = other DNA; note = Description of Artificial Sequence: Synthetic oligonucleotide; note = Description of Combined DNA/RNA Molecule: Synthetic oligonucleotide
  misc_feature 1..19: note = RNA
  misc_feature 20..21: note = DNA
tcacctcatatgctatgtttt

SEQ ID NO: 828 - DNA, 21 bp, synthetic construct
  source 1..21: mol_type = other DNA; note = Description of Artificial Sequence: Synthetic oligonucleotide; note = Description of Combined DNA/RNA Molecule: Synthetic oligonucleotide
  misc_feature 1..19: note = RNA
  misc_feature 20..21: note = DNA
aacatagcatatgaggtgatt

SEQ ID NO: 829 - DNA, 21 bp, synthetic construct
  source 1..21: mol_type = other DNA; note = Description of Artificial Sequence: Synthetic oligonucleotide; note = Description of Combined DNA/RNA Molecule: Synthetic oligonucleotide
  misc_feature 1..19: note = RNA
  misc_feature 20..21: note = DNA
cctcatatgctatgttagatt

SEQ ID NO: 830 - DNA, 21 bp, synthetic construct
  source 1..21: mol_type = other DNA; note = Description of Artificial Sequence: Synthetic oligonucleotide; note = Description of Combined DNA/RNA Molecule: Synthetic oligonucleotide
  misc_feature 1..19: note = RNA
  misc_feature 20..21: note = DNA
tctaacatagcatatgaggtt

SEQ ID NO: 831 - DNA, 21 bp, synthetic construct
  source 1..21: mol_type = other DNA; note = Description of Artificial Sequence: Synthetic oligonucleotide; note = Description of Combined DNA/RNA Molecule: Synthetic oligonucleotide
  misc_feature 1..19: note = RNA
  misc_feature 20..21: note = DNA
atgttagaagtccaggcagtt

SEQ ID NO: 832 - DNA, 21 bp, synthetic construct
  source 1..21: mol_type = other DNA; note = Description of Artificial Sequence: Synthetic oligonucleotide; note = Description of Combined DNA/RNA Molecule: Synthetic oligonucleotide
  misc_feature 1..19: note = RNA
  misc_feature 20..21: note = DNA
ctgcctggacttctaacattt

SEQ ID NO: 833 - DNA, 21 bp, synthetic construct
  source 1..21: mol_type = other DNA; note = Description of Artificial Sequence: Synthetic oligonucleotide; note = Description of Combined DNA/RNA Molecule: Synthetic oligonucleotide
  misc_feature 1..19: note = RNA
  misc_feature 20..21: note = DNA
tctgaggctggccctacggtt

SEQ ID NO: 834 - DNA, 21 bp, synthetic construct
  source 1..21: mol_type = other DNA; note = Description of Artificial Sequence: Synthetic oligonucleotide; note = Description of Combined DNA/RNA Molecule: Synthetic oligonucleotide
  misc_feature 1..19: note = RNA
  misc_feature 20..21: note = DNA
ccgtagggccagcctcagatt

SEQ ID NO: 835 - DNA, 21 bp, synthetic construct
  source 1..21: mol_type = other DNA; note = Description of Artificial Sequence: Synthetic oligonucleotide; note = Description of Combined DNA/RNA Molecule: Synthetic oligonucleotide
  misc_feature 1..19: note = RNA
  misc_feature 20..21: note = DNA
ggccctacgggcaccggtgtt

SEQ ID NO: 836 - DNA, 21 bp, synthetic construct
  source 1..21: mol_type = other DNA; note = Description of Artificial Sequence: Synthetic oligonucleotide; note = Description of Combined DNA/RNA Molecule: Synthetic oligonucleotide
  misc_feature 1..19: note = RNA
  misc_feature 20..21: note = DNA
caccggtgcccgtagggcctt

SEQ ID NO: 837 - DNA, 21 bp, synthetic construct
  source 1..21: mol_type = other DNA; note = Description of Artificial Sequence: Synthetic oligonucleotide; note = Description of Combined DNA/RNA Molecule: Synthetic oligonucleotide
  misc_feature 1..19: note = RNA
  misc_feature 20..21: note = DNA
gggcaccggtgaatccaagtt

SEQ ID NO: 838 - DNA, 21 bp, synthetic construct
  source 1..21: mol_type = other DNA; note = Description of Artificial Sequence: Synthetic oligonucleotide; note = Description of Combined DNA/RNA Molecule: Synthetic oligonucleotide
  misc_feature 1..19: note = RNA
  misc_feature 20..21: note = DNA
cttggattcaccggtgccctt

SEQ ID NO: 839 - DNA, 21 bp, synthetic construct
  source 1..21: mol_type = other DNA; note = Description of Artificial Sequence: Synthetic oligonucleotide; note = Description of Combined DNA/RNA Molecule: Synthetic oligonucleotide
  misc_feature 1..19: note = RNA
  misc_feature 20..21: note = DNA
ccatgcatgtgttcagaaatt

SEQ ID NO: 840 - DNA, 21 bp, synthetic construct
  source 1..21: mol_type = other DNA; note = Description of Artificial Sequence: Synthetic oligonucleotide; note = Description of Combined DNA/RNA Molecule: Synthetic oligonucleotide
  misc_feature 1..19: note = RNA
  misc_feature 20..21: note = DNA
tttctgaacacatgcatggtt

SEQ ID NO: 841 - DNA, 21 bp, synthetic construct
  source 1..21: mol_type = other DNA; note = Description of Artificial Sequence: Synthetic oligonucleotide; note = Description of Combined DNA/RNA Molecule: Synthetic oligonucleotide
  modified_base 1: mod_base = OTHER; note = 2'-O-methylcytidine-3'-phosphate
  modified_base 2: mod_base = OTHER; note = 2'-O-methylcytidine-3'-phosphate
  modified_base 5: mod_base = OTHER; note = 2'-O-methyluridine-3'-phosphate
  modified_base 9: mod_base = OTHER; note = 2'-O-methyluridine-3'-phosphate
  modified_base 10: mod_base = OTHER; note = 2'-O-methylcytidine-3'-phosphate
  modified_base 11: mod_base = OTHER; note = 2'-O-methylcytidine-3'-phosphate
  modified_base 15: mod_base = OTHER; note = 2'-O-methyluridine-3'-phosphate
  modified_base 17: mod_base = OTHER; note = 2'-O-methyluridine-3'-phosphate
  modified_base 18: mod_base = OTHER; note = 2'-O-methylcytidine-3'-phosphate
  modified_base 19: mod_base = OTHER; note = 2'-O-methylcytidine-3'-phosphate
  misc_feature 1..19: note = RNA
  misc_feature 20..21: note = DNA
ccggtgaatccaagtgtcctt

SEQ ID NO: 842 - DNA, 21 bp, synthetic construct
  source 1..21: mol_type = other DNA; note = Description of Artificial Sequence: Synthetic oligonucleotide; note = Description of Combined DNA/RNA Molecule: Synthetic oligonucleotide
  modified_base 4: mod_base = OTHER; note = 2'-O-methylcytidine-3'-phosphate
  modified_base 14: mod_base = OTHER; note = 2'-O-methylcytidine-3'-phosphate
  misc_feature 1..19: note = RNA
  misc_feature 20..21: note = DNA
ggacacttggattcaccggtt

SEQ ID NO: 843 - DNA, 21 bp, synthetic construct
  source 1..21: mol_type = other DNA; note = Description of Artificial Sequence: Synthetic oligonucleotide; note = Description of Combined DNA/RNA Molecule: Synthetic oligonucleotide
  modified_base 2: mod_base = OTHER; note = 2'-O-methylcytidine-3'-phosphate
  modified_base 3: mod_base = OTHER; note = 2'-O-methyluridine-3'-phosphate
  modified_base 4: mod_base = OTHER; note = 2'-O-methylcytidine-3'-phosphate
  modified_base 6: mod_base = OTHER; note = 2'-O-methyluridine-3'-phosphate
  modified_base 7: mod_base = OTHER; note = 2'-O-methyluridine-3'-phosphate
  modified_base 8: mod_base = OTHER; note = 2'-O-methylcytidine-3'-phosphate
  modified_base 9: mod_base = OTHER; note = 2'-O-methyluridine-3'-phosphate
  modified_base 10: mod_base = OTHER; note = 2'-O-methyluridine-3'-phosphate
  modified_base 13: mod_base = OTHER; note = 2'-O-methylcytidine-3'-phosphate
  modified_base 18: mod_base = OTHER; note = 2'-O-methyluridine-3'-phosphate
  misc_feature 1..19: note = RNA
  misc_feature 20..21: note = DNA
actcattcttggcaggatgtt

SEQ ID NO: 844 - DNA, 21 bp, synthetic construct
  source 1..21: mol_type = other DNA; note = Description of Artificial Sequence: Synthetic oligonucleotide; note = Description of Combined DNA/RNA Molecule: Synthetic oligonucleotide
  modified_base 1: mod_base = OTHER; note = 2'-O-methylcytidine-3'-phosphate
  modified_base 9: mod_base = OTHER; note = 2'-O-methylcytidine-3'-phosphate
  misc_feature 1..19: note = RNA
  misc_feature 20..21: note = DNA
catcctgccaagaatgagttt

SEQ ID NO: 845 - DNA, 21 bp, synthetic construct
  source 1..21: mol_type = other DNA; note = Description of Artificial Sequence: Synthetic oligonucleotide; note = Description of Combined DNA/RNA Molecule: Synthetic oligonucleotide
  modified_base 4: mod_base = OTHER; note = 2'-O-methyluridine-3'-phosphate
  modified_base 6: mod_base = OTHER; note = 2'-O-methyluridine-3'-phosphate
  modified_base 7: mod_base = OTHER; note = 2'-O-methylcytidine-3'-phosphate
  modified_base 8: mod_base = OTHER; note = 2'-O-methylcytidine-3'-phosphate
  modified_base 9: mod_base = OTHER; note = 2'-O-methyluridine-3'-phosphate
  modified_base 10: mod_base = OTHER; note = 2'-O-methylcytidine-3'-phosphate
  modified_base 11: mod_base = OTHER; note = 2'-O-methyluridine-3'-phosphate
  modified_base 14: mod_base = OTHER; note = 2'-O-methyluridine-3'-phosphate
  modified_base 17: mod_base = OTHER; note = 2'-O-methyluridine-3'-phosphate
  modified_base 18: mod_base = OTHER; note = 2'-O-methylcytidine-3'-phosphate
  misc_feature 1..19: note = RNA
  misc_feature 20..21: note = DNA
aagtgtcctctgatggtcatt

SEQ ID NO: 846 - DNA, 21 bp, synthetic construct
  source 1..21: mol_type = other DNA; note = Description of Artificial Sequence: Synthetic oligonucleotide; note = Description of Combined DNA/RNA Molecule: Synthetic oligonucleotide
  modified_base 5: mod_base = OTHER; note = 2'-O-methylcytidine-3'-phosphate
  modified_base 8: mod_base = OTHER; note = 2'-O-methylcytidine-3'-phosphate
  modified_base 15: mod_base = OTHER; note = 2'-O-methylcytidine-3'-phosphate
  misc_feature 1..19: note = RNA
  misc_feature 20..21: note = DNA
tgaccatcagaggacactttt

SEQ ID NO: 847 - DNA, 21 bp, synthetic construct
  source 1..21: mol_type = other DNA; note = Description of Artificial Sequence: Synthetic oligonucleotide; note = Description of Combined DNA/RNA Molecule: Synthetic oligonucleotide
  modified_base 1: mod_base = OTHER; note = 2'-O-methyluridine-3'-phosphate
  modified_base 2: mod_base = OTHER; note = 2'-O-methylcytidine-3'-phosphate
  modified_base 4: mod_base = OTHER; note = 2'-O-methyluridine-3'-phosphate
  modified_base 5: mod_base = OTHER; note = 2'-O-methyluridine-3'-phosphate
  modified_base 6: mod_base = OTHER; note = 2'-O-methylcytidine-3'-phosphate
  modified_base 7: mod_base = OTHER; note = 2'-O-methyluridine-3'-phosphate
  modified_base 8: mod_base = OTHER; note = 2'-O-methyluridine-3'-phosphate
  modified_base 11: mod_base = OTHER; note = 2'-O-methylcytidine-3'-phosphate
  modified_base 16: mod_base = OTHER; note = 2'-O-methyluridine-3'-phosphate
  modified_base 19: mod_base = OTHER; note = 2'-O-methylcytidine-3'-phosphate
  misc_feature 1..19: note = RNA
  misc_feature 20..21: note = DNA
tcattcttggcaggatggctt

SEQ ID NO: 848 - DNA, 21 bp, synthetic construct
  source 1..21: mol_type = other DNA; note = Description of Artificial Sequence: Synthetic oligonucleotide; note = Description of Combined DNA/RNA Molecule: Synthetic oligonucleotide
  modified_base 3: mod_base = OTHER; note = 2'-O-methylcytidine-3'-phosphate
  modified_base 11: mod_base = OTHER; note = 2'-O-methylcytidine-3'-phosphate
  misc_feature 1..19: note = RNA
  misc_feature 20..21: note = DNA
gccatcctgccaagaatgatt

SEQ ID NO: 849 - DNA, 21 bp, synthetic construct
  source 1..21: mol_type = other DNA; note = Description of Artificial Sequence: Synthetic oligonucleotide; note = Description of Combined DNA/RNA Molecule: Synthetic oligonucleotide
  modified_base 4: mod_base = OTHER; note = 2'-O-methyluridine-3'-phosphate
  modified_base 5: mod_base = OTHER; note = 2'-O-methyluridine-3'-phosphate
  modified_base 6: mod_base = OTHER; note = 2'-O-methylcytidine-3'-phosphate
  modified_base 7: mod_base = OTHER; note = 2'-O-methyluridine-3'-phosphate
  modified_base 11: mod_base = OTHER; note = 2'-O-methyluridine-3'-phosphate
  modified_base 13: mod_base = OTHER; note = 2'-O-methylcytidine-3'-phosphate
  modified_base 14: mod_base = OTHER; note = 2'-O-methyluridine-3'-phosphate
  modified_base 16: mod_base = OTHER; note = 2'-O-methyluridine-3'-phosphate
  modified_base 17: mod_base = OTHER; note = 2'-O-methylcytidine-3'-phosphate
  modified_base 18: mod_base = OTHER; note = 2'-O-methylcytidine-3'-phosphate
  misc_feature 1..19: note = RNA
  misc_feature 20..21: note = DNA
aagttctagatgctgtccgtt

SEQ ID NO: 850 - DNA, 21 bp, synthetic construct
  source 1..21: mol_type = other DNA; note = Description of Artificial Sequence: Synthetic oligonucleotide; note = Description of Combined DNA/RNA Molecule: Synthetic oligonucleotide
  modified_base 5: mod_base = OTHER; note = 2'-O-methylcytidine-3'-phosphate
  modified_base 8: mod_base = OTHER; note = 2'-O-methylcytidine-3'-phosphate
  modified_base 12: mod_base = OTHER; note = 2'-O-methyluridine-3'-phosphate
  misc_feature 1..19: note = RNA
  misc_feature 20..21: note = DNA
cggacagcatctagaactttt

SEQ ID NO: 851 - DNA, 21 bp, synthetic construct
  source 1..21: mol_type = other DNA; note = Description of Artificial Sequence: Synthetic oligonucleotide; note = Description of Combined DNA/RNA Molecule: Synthetic oligonucleotide
  modified_base 2: mod_base = OTHER; note = 2'-O-methyluridine-3'-phosphate
  modified_base 3: mod_base = OTHER; note = 2'-O-methyluridine-3'-phosphate
  modified_base 4: mod_base = OTHER; note = 2'-O-methylcytidine-3'-phosphate
  modified_base 5: mod_base = OTHER; note = 2'-O-methyluridine-3'-phosphate
  modified_base 9: mod_base = OTHER; note = 2'-O-methyluridine-3'-phosphate
  modified_base 11: mod_base = OTHER; note = 2'-O-methylcytidine-3'-phosphate
  modified_base 12: mod_base = OTHER; note = 2'-O-methyluridine-3'-phosphate
  modified_base 14: mod_base = OTHER; note = 2'-O-methyluridine-3'-phosphate
  modified_base 15: mod_base = OTHER; note = 2'-O-methylcytidine-3'-phosphate
  modified_base 16: mod_base = OTHER; note = 2'-O-methylcytidine-3'-phosphate
  misc_feature 1..19: note = RNA
  misc_feature 20..21: note = DNA
gttctagatgctgtccgagtt

SEQ ID NO: 852 - DNA, 21 bp, synthetic construct
  source 1..21: mol_type = other DNA; note = Description of Artificial Sequence: Synthetic oligonucleotide; note = Description of Combined DNA/RNA Molecule: Synthetic oligonucleotide
  modified_base 7: mod_base = OTHER; note = 2'-O-methylcytidine-3'-phosphate
  modified_base 10: mod_base = OTHER; note = 2'-O-methylcytidine-3'-phosphate
  modified_base 14: mod_base = OTHER; note = 2'-O-methyluridine-3'-phosphate
  misc_feature 1..19: note = RNA
  misc_feature 20..21: note = DNA
ctcggacagcatctagaactt

SEQ ID NO: 853 - DNA, 21 bp, synthetic construct
  source 1..21: mol_type = other DNA; note = Description of Artificial Sequence: Synthetic oligonucleotide; note = Description of Combined DNA/RNA Molecule: Synthetic oligonucleotide
  modified_base 1: mod_base = OTHER; note = 2'-O-methylcytidine-3'-phosphate
  modified_base 2: mod_base = OTHER; note = 2'-O-methyluridine-3'-phosphate
  modified_base 6: mod_base = OTHER; note = 2'-O-methyluridine-3'-phosphate
  modified_base 8: mod_base = OTHER; note = 2'-O-methylcytidine-3'-phosphate
  modified_base 9: mod_base = OTHER; note = 2'-O-methyluridine-3'-phosphate
  modified_base 11: mod_base = OTHER; note = 2'-O-methyluridine-3'-phosphate
  modified_base 12: mod_base = OTHER; note = 2'-O-methylcytidine-3'-phosphate
  modified_base 13: mod_base = OTHER; note = 2'-O-methylcytidine-3'-phosphate
  modified_base 18: mod_base = OTHER; note = 2'-O-methylcytidine-3'-phosphate
  misc_feature 1..19: note = RNA
  misc_feature 20..21: note = DNA
ctagatgctgtccgaggcatt

SEQ ID NO: 854 - DNA, 21 bp, synthetic construct
  source 1..21: mol_type = other DNA; note = Description of Artificial Sequence: Synthetic oligonucleotide; note = Description of Combined DNA/RNA Molecule: Synthetic oligonucleotide
  modified_base 10: mod_base = OTHER; note = 2'-O-methylcytidine-3'-phosphate
  modified_base 13: mod_base = OTHER; note = 2'-O-methylcytidine-3'-phosphate
  modified_base 17: mod_base = OTHER; note = 2'-O-methyluridine-3'-phosphate
  misc_feature 1..19: note = RNA
  misc_feature 20..21: note = DNA
tgcctcggacagcatctagtt

SEQ ID NO: 855 - DNA, 21 bp, synthetic construct
  source 1..21: mol_type = other DNA; note = Description of Artificial Sequence: Synthetic oligonucleotide; note = Description of Combined DNA/RNA Molecule: Synthetic oligonucleotide
  modified_base 3: mod_base = OTHER; note = 2'-O-methyluridine-3'-phosphate
  modified_base 5: mod_base = OTHER; note = 2'-O-methylcytidine-3'-phosphate
  modified_base 6: mod_base = OTHER; note = 2'-O-methyluridine-3'-phosphate
  modified_base 8: mod_base = OTHER; note = 2'-O-methyluridine-3'-phosphate
  modified_base 9: mod_base = OTHER; note = 2'-O-methylcytidine-3'-phosphate
  modified_base 10: mod_base = OTHER; note = 2'-O-methylcytidine-3'-phosphate
  modified_base 15: mod_base = OTHER; note = 2'-O-methylcytidine-3'-phosphate
  modified_base 18: mod_base = OTHER; note = 2'-O-methyluridine-3'-phosphate
  modified_base 19: mod_base = OTHER; note = 2'-O-methylcytidine-3'-phosphate
  misc_feature 1..19: note = RNA
  misc_feature 20..21: note = DNA
gatgctgtccgaggcagtctt

SEQ ID NO: 856 - DNA, 21 bp, synthetic construct
  source 1..21: mol_type = other DNA; note = Description of Artificial Sequence: Synthetic oligonucleotide; note = Description of Combined DNA/RNA Molecule: Synthetic oligonucleotide
  modified_base 13: mod_base = OTHER; note = 2'-O-methylcytidine-3'-phosphate
  modified_base 16: mod_base = OTHER; note = 2'-O-methylcytidine-3'-phosphate
  misc_feature 1..19: note = RNA
  misc_feature 20..21: note = DNA
gactgcctcggacagcatctt

SEQ ID NO: 857 - DNA, 21 bp, synthetic construct
  source 1..21: mol_type = other DNA; note = Description of Artificial Sequence: Synthetic oligonucleotide; note = Description of Combined DNA/RNA Molecule: Synthetic oligonucleotide
  modified_base 1: mod_base = OTHER; note = 2'-O-methylcytidine-3'-phosphate
  modified_base 3: mod_base = OTHER; note = 2'-O-methyluridine-3'-phosphate
  modified_base 4: mod_base = OTHER; note = 2'-O-methyluridine-3'-phosphate
  modified_base 5: mod_base = OTHER; note = 2'-O-methylcytidine-3'-phosphate
  modified_base 6: mod_base = OTHER; note = 2'-O-methyluridine-3'-phosphate
  modified_base 7: mod_base = OTHER; note = 2'-O-methyluridine-3'-phosphate
  modified_base 10: mod_base = OTHER; note = 2'-O-methylcytidine-3'-phosphate
  modified_base 15: mod_base = OTHER; note = 2'-O-methyluridine-3'-phosphate
  modified_base 18: mod_base = OTHER; note = 2'-O-methylcytidine-3'-phosphate
  modified_base 19: mod_base = OTHER; note = 2'-O-methyluridine-3'-phosphate
  misc_feature 1..19: note = RNA
  misc_feature 20..21: note = DNA
cattcttggcaggatggcttt

SEQ ID NO: 858 - DNA, 21 bp, synthetic construct
  source 1..21: mol_type = other DNA; note = Description of Artificial Sequence: Synthetic oligonucleotide; note = Description of Combined DNA/RNA Molecule: Synthetic oligonucleotide
  modified_base 4: mod_base = OTHER; note = 2'-O-methylcytidine-3'-phosphate
  modified_base 12: mod_base = OTHER; note = 2'-O-methylcytidine-3'-phosphate
  misc_feature 1..19: note = RNA
  misc_feature 20..21: note = DNA
agccatcctgccaagaatgtt

SEQ ID NO: 859 - DNA, 21 bp, synthetic construct
  source 1..21: mol_type = other DNA; note = Description of Artificial Sequence: Synthetic oligonucleotide; note = Description of Combined DNA/RNA Molecule: Synthetic oligonucleotide
  modified_base 1: mod_base = OTHER; note = 2'-O-methyluridine-3'-phosphate
  modified_base 3: mod_base = OTHER; note = 2'-O-methylcytidine-3'-phosphate
  modified_base 4: mod_base = OTHER; note = 2'-O-methyluridine-3'-phosphate
  modified_base 6: mod_base = OTHER; note = 2'-O-methyluridine-3'-phosphate
  modified_base 7: mod_base = OTHER; note = 2'-O-methylcytidine-3'-phosphate
  modified_base 8: mod_base = OTHER; note = 2'-O-methylcytidine-3'-phosphate
  modified_base 13: mod_base = OTHER; note = 2'-O-methylcytidine-3'-phosphate
  modified_base 16: mod_base = OTHER; note = 2'-O-methyluridine-3'-phosphate
  modified_base 17: mod_base = OTHER; note = 2'-O-methylcytidine-3'-phosphate
  modified_base 18: mod_base = OTHER; note = 2'-O-methylcytidine-3'-phosphate
  modified_base 19: mod_base = OTHER; note = 2'-O-methyluridine-3'-phosphate
  misc_feature 1..19: note = RNA
  misc_feature 20..21: note = DNA
tgctgtccgaggcagtccttt

SEQ ID NO: 860 - DNA, 21 bp, synthetic construct
  source 1..21: mol_type = other DNA; note = Description of Artificial Sequence: Synthetic oligonucleotide; note = Description of Combined DNA/RNA Molecule: Synthetic oligonucleotide
  modified_base 15: mod_base = OTHER; note = 2'-O-methylcytidine-3'-phosphate
  modified_base 18: mod_base = OTHER; note = 2'-O-methylcytidine-3'-phosphate
  misc_feature 1..19: note = RNA
  misc_feature 20..21: note = DNA
aggactgcctcggacagcatt

SEQ ID NO: 861 - DNA, 21 bp, synthetic construct
  source 1..21: mol_type = other DNA; note = Description of Artificial Sequence: Synthetic oligonucleotide; note = Description of Combined DNA/RNA Molecule: Synthetic oligonucleotide
  modified_base 1: mod_base = OTHER; note = 2'-O-methylcytidine-3'-phosphate
  modified_base 2: mod_base = OTHER; note = 2'-O-methylcytidine-3'-phosphate
  modified_base 7: mod_base = OTHER; note = 2'-O-methylcytidine-3'-phosphate
  modified_base 10: mod_base = OTHER; note = 2'-O-methyluridine-3'-phosphate
  modified_base 11: mod_base = OTHER; note = 2'-O-methylcytidine-3'-phosphate
  modified_base 12: mod_base = OTHER; note = 2'-O-methylcytidine-3'-phosphate
  modified_base 13: mod_base = OTHER; note = 2'-O-methyluridine-3'-phosphate
  modified_base 15: mod_base = OTHER; note = 2'-O-methylcytidine-3'-phosphate
  modified_base 16: mod_base = OTHER; note = 2'-O-methylcytidine-3'-phosphate
  modified_base 18: mod_base = OTHER; note = 2'-O-methyluridine-3'-phosphate
  modified_base 19: mod_base = OTHER; note = 2'-O-methylcytidine-3'-phosphate
  misc_feature 1..19: note = RNA
  misc_feature 20..21: note = DNA
ccgaggcagtcctgccatctt

SEQ ID NO: 862 - DNA, 21 bp, synthetic construct
  source 1..21: mol_type = other DNA; note = Description of Artificial Sequence: Synthetic oligonucleotide; note = Description of Combined DNA/RNA Molecule: Synthetic oligonucleotide
  modified_base 6: mod_base = OTHER; note = 2'-O-methylcytidine-3'-phosphate
  misc_feature 1..19: note = RNA
  misc_feature 20..21: note = DNA
gatggcaggactgcctcggtt

SEQ ID NO: 863 - DNA, 21 bp, synthetic construct
  source 1..21: mol_type = other DNA; note = Description of Artificial Sequence: Synthetic oligonucleotide; note = Description of Combined DNA/RNA Molecule: Synthetic oligonucleotide
  modified_base 1: mod_base = OTHER; note = 2'-O-methylcytidine-3'-phosphate
  modified_base 4: mod_base = OTHER; note = 2'-O-methyluridine-3'-phosphate
  modified_base 5: mod_base = OTHER; note = 2'-O-methylcytidine-3'-phosphate
  modified_base 6: mod_base = OTHER; note = 2'-O-methylcytidine-3'-phosphate
  modified_base 7: mod_base = OTHER; note = 2'-O-methyluridine-3'-phosphate
  modified_base 9: mod_base = OTHER; note = 2'-O-methylcytidine-3'-phosphate
  modified_base 10: mod_base = OTHER; note = 2'-O-methylcytidine-3'-phosphate
  modified_base 12: mod_base = OTHER; note = 2'-O-methyluridine-3'-phosphate
  modified_base 13: mod_base = OTHER; note = 2'-O-methylcytidine-3'-phosphate
  modified_base 16: mod_base = OTHER; note = 2'-O-methyluridine-3'-phosphate
  modified_base 18: mod_base = OTHER; note = 2'-O-methyluridine-3'-phosphate
  misc_feature 1..19: note = RNA
  misc_feature 20..21: note = DNA
cagtcctgccatcaatgtgtt

SEQ ID NO: 864 - DNA, 21 bp, synthetic construct
  source 1..21: mol_type = other DNA; note = Description of Artificial Sequence: Synthetic oligonucleotide; note = Description of Combined DNA/RNA Molecule: Synthetic oligonucleotide
  modified_base 1: mod_base = OTHER; note = 2'-O-methylcytidine-3'-phosphate
  modified_base 3: mod_base = OTHER; note = 2'-O-methylcytidine-3'-phosphate
  modified_base 12: mod_base = OTHER; note = 2'-O-methylcytidine-3'-phosphate
  misc_feature 1..19: note = RNA
  misc_feature 20..21: note = DNA
cacattgatggcaggactgtt

SEQ ID NO: 865 - DNA, 21 bp, synthetic construct
  source 1..21: mol_type = other DNA; note = Description of Artificial Sequence: Synthetic oligonucleotide; note = Description of Combined DNA/RNA Molecule: Synthetic oligonucleotide
  modified_base 1: mod_base = OTHER; note = 2'-O-methylcytidine-3'-phosphate
  modified_base 4: mod_base = OTHER; note = 2'-O-methyluridine-3'-phosphate
  modified_base 6: mod_base = OTHER; note = 2'-O-methyluridine-3'-phosphate
  modified_base 9: mod_base = OTHER; note = 2'-O-methylcytidine-3'-phosphate
  modified_base 10: mod_base = OTHER; note = 2'-O-methylcytidine-3'-phosphate
  modified_base 12: mod_base = OTHER; note = 2'-O-methyluridine-3'-phosphate
  modified_base 14: mod_base = OTHER; note = 2'-O-methylcytidine-3'-phosphate
  modified_base 16: mod_base = OTHER; note = 2'-O-methyluridine-3'-phosphate
  modified_base 18: mod_base = OTHER; note = 2'-O-methyluridine-3'-phosphate
  misc_feature 1..19: note = RNA
  misc_feature 20..21: note = DNA
caatgtggccgtgcatgtgtt

SEQ ID NO: 866 - DNA, 21 bp, synthetic construct
  source 1..21: mol_type = other DNA; note = Description of Artificial Sequence: Synthetic oligonucleotide; note = Description of Combined DNA/RNA Molecule: Synthetic oligonucleotide
  modified_base 1: mod_base = OTHER; note = 2'-O-methylcytidine-3'-phosphate
  modified_base 3: mod_base = OTHER; note = 2'-O-methylcytidine-3'-phosphate
  modified_base 7: mod_base = OTHER; note = 2'-O-methylcytidine-3'-phosphate
  modified_base 13: mod_base = OTHER; note = 2'-O-methylcytidine-3'-phosphate
  modified_base 15: mod_base = OTHER; note = 2'-O-methylcytidine-3'-phosphate
  misc_feature 1..19: note = RNA
  misc_feature 20..21: note = DNA
cacatgcacggccacattgtt

SEQ ID NO: 867 - DNA, 21 bp, synthetic construct
  source 1..21: mol_type = other DNA; note = Description of Artificial Sequence: Synthetic oligonucleotide; note = Description of Combined DNA/RNA Molecule: Synthetic oligonucleotide
  modified_base 2: mod_base = OTHER; note = 2'-O-methyluridine-3'-phosphate
  modified_base 4: mod_base = OTHER; note = 2'-O-methyluridine-3'-phosphate
  modified_base 6: mod_base = OTHER; note = 2'-O-methyluridine-3'-phosphate
  modified_base 7: mod_base = OTHER; note = 2'-O-methyluridine-3'-phosphate
  modified_base 8: mod_base = OTHER; note = 2'-O-methylcytidine-3'-phosphate
  modified_base 16: mod_base = OTHER; note = 2'-O-methylcytidine-3'-phosphate
  modified_base 17: mod_base = OTHER; note = 2'-O-methyluridine-3'-phosphate
  modified_base 19: mod_base = OTHER; note = 2'-O-methylcytidine-3'-phosphate
  misc_feature 1..19: note = RNA
  misc_feature 20..21: note = DNA
atgtgttcagaaaggctgctt

SEQ ID NO: 868 - DNA, 21 bp, synthetic construct
  source 1..21: mol_type = other DNA; note = Description of Artificial Sequence: Synthetic oligonucleotide; note = Description of Combined DNA/RNA Molecule: Synthetic oligonucleotide
  modified_base 2: mod_base = OTHER; note = 2'-O-methylcytidine-3'-phosphate
  modified_base 15: mod_base = OTHER; note = 2'-O-methylcytidine-3'-phosphate
  modified_base 17: mod_base = OTHER; note = 2'-O-methylcytidine-3'-phosphate
  misc_feature 1..19: note = RNA
  misc_feature 20..21: note = DNA
gcagcctttctgaacacattt

SEQ ID NO: 869 - DNA, 21 bp, synthetic construct
  source 1..21: mol_type = other DNA; note = Description of Artificial Sequence: Synthetic oligonucleotide; note = Description of Combined DNA/RNA Molecule: Synthetic oligonucleotide
  modified_base 1: mod_base = OTHER; note = 2'-O-methylcytidine-3'-phosphate
  modified_base 7: mod_base = OTHER; note = 2'-O-methyluridine-3'-phosphate
  modified_base 8: mod_base = OTHER; note = 2'-O-methylcytidine-3'-phosphate
  modified_base 9: mod_base = OTHER; note = 2'-O-methylcytidine-3'-phosphate
  modified_base 11: mod_base = OTHER; note = 2'-O-methylcytidine-3'-phosphate
  modified_base 12: mod_base = OTHER; note = 2'-O-methyluridine-3'-phosphate
  modified_base 13: mod_base = OTHER; note = 2'-O-methylcytidine-3'-phosphate
  modified_base 15: mod_base = OTHER; note = 2'-O-methyluridine-3'-phosphate
  modified_base 16: mod_base = OTHER; note = 2'-O-methyluridine-3'-phosphate
  modified_base 17: mod_base = OTHER; note = 2'-O-methylcytidine-3'-phosphate
  modified_base 18: mod_base = OTHER; note = 2'-O-methyluridine-3'-phosphate
  modified_base 19: mod_base = OTHER; note = 2'-O-methyluridine-3'-phosphate
  misc_feature 1..19: note = RNA
  misc_feature 20..21: note = DNA
cagaagtccactcattctttt

SEQ ID NO: 870 - DNA, 21 bp, synthetic construct
  source 1..21: mol_type = other DNA; note = Description of Artificial Sequence: Synthetic oligonucleotide; note = Description of Combined DNA/RNA Molecule: Synthetic oligonucleotide
  misc_feature 1..19: note = RNA
  misc_feature 20..21: note = DNA
aagaatgagtggacttctgtt

SEQ ID NO: 871 - DNA, 21 bp, synthetic construct
  source 1..21: mol_type = other DNA; note = Description of Artificial Sequence: Synthetic oligonucleotide; note = Description of Combined DNA/RNA Molecule: Synthetic oligonucleotide
  modified_base 3: mod_base = OTHER; note = 2'-O-methylcytidine-3'-phosphate
  modified_base 8: mod_base = OTHER; note = 2'-O-methyluridine-3'-phosphate
  modified_base 11: mod_base = OTHER; note = 2'-O-methylcytidine-3'-phosphate
  modified_base 12: mod_base = OTHER; note = 2'-O-methyluridine-3'-phosphate
  modified_base 13: mod_base = OTHER; note = 2'-O-methyluridine-3'-phosphate
  modified_base 14: mod_base = OTHER; note = 2'-O-methylcytidine-3'-phosphate
  modified_base 15: mod_base = OTHER; note = 2'-O-methyluridine-3'-phosphate
  modified_base 16: mod_base = OTHER; note = 2'-O-methylcytidine-3'-phosphate
  modified_base 18: mod_base = OTHER; note = 2'-O-methyluridine-3'-phosphate
  modified_base 19: mod_base = OTHER; note = 2'-O-methylcytidine-3'-phosphate
  misc_feature 1..19: note = RNA
  misc_feature 20..21: note = DNA
ggcaggatggcttctcatctt

SEQ ID NO: 872 - DNA, 21 bp, synthetic construct
  source 1..21: mol_type = other DNA; note = Description of Artificial Sequence: Synthetic oligonucleotide; note = Description of Combined DNA/RNA Molecule: Synthetic oligonucleotide
  modified_base 11: mod_base = OTHER; note = 2'-O-methylcytidine-3'-phosphate
  misc_feature 1..19: note = RNA
  misc_feature 20..21: note = DNA
gatgagaagccatcctgcctt

SEQ ID NO: 873 - DNA, 21 bp, synthetic construct
  source 1..21: mol_type = other DNA; note = Description of Artificial Sequence: Synthetic oligonucleotide; note = Description of Combined DNA/RNA Molecule: Synthetic oligonucleotide
  modified_base 4: mod_base = OTHER; note = 2'-O-methylcytidine-3'-phosphate
  modified_base 5: mod_base = OTHER; note = 2'-O-methylcytidine-3'-phosphate
  modified_base 7: mod_base = OTHER; note = 2'-O-methyluridine-3'-phosphate
  modified_base 8: mod_base = OTHER; note = 2'-O-methyluridine-3'-phosphate
  modified_base 9: mod_base = OTHER; note = 2'-O-methyluridine-3'-phosphate
  modified_base 11: mod_base = OTHER; note = 2'-O-methylcytidine-3'-phosphate
  modified_base 12: mod_base = OTHER; note = 2'-O-methylcytidine-3'-phosphate
  modified_base 13: mod_base = OTHER; note = 2'-O-methyluridine-3'-phosphate
  modified_base 14: mod_base = OTHER; note = 2'-O-methylcytidine-3'-phosphate
  modified_base 15: mod_base = OTHER; note = 2'-O-methyluridine-3'-phosphate
  misc_feature 1..19: note = RNA
  misc_feature 20..21: note = DNA
gagccatttgcctctgggatt

SEQ ID NO: 874 - DNA, 21 bp, synthetic construct
  source 1..21: mol_type = other DNA; note = Description of Artificial Sequence: Synthetic oligonucleotide; note = Description of Combined DNA/RNA Molecule: Synthetic oligonucleotide
  modified_base 4: mod_base = OTHER; note = 2'-O-methylcytidine-3'-phosphate
  modified_base 10: mod_base = OTHER; note = 2'-O-methylcytidine-3'-phosphate
  misc_feature 1..19: note = RNA
  misc_feature 20..21: note = DNA
tcccagaggcaaatggctctt

SEQ ID NO: 875 - DNA, 21 bp, synthetic construct
  source 1..21: mol_type = other DNA; note = Description of Artificial Sequence: Synthetic oligonucleotide; note = Description of Combined DNA/RNA Molecule: Synthetic oligonucleotide
  modified_base 1: mod_base = OTHER; note = 2'-O-methylcytidine-3'-phosphate
  modified_base 6: mod_base = OTHER; note = 2'-O-methyluridine-3'-phosphate
  modified_base 9: mod_base = OTHER; note = 2'-O-methylcytidine-3'-phosphate
  modified_base 10: mod_base = OTHER; note = 2'-O-methyluridine-3'-phosphate
  modified_base 11: mod_base = OTHER; note = 2'-O-methyluridine-3'-phosphate
  modified_base 12: mod_base = OTHER; note = 2'-O-methylcytidine-3'-phosphate
  modified_base 13: mod_base = OTHER; note = 2'-O-methyluridine-3'-phosphate
  modified_base 14: mod_base = OTHER; note = 2'-O-methylcytidine-3'-phosphate
  modified_base 16: mod_base = OTHER; note = 2'-O-methyluridine-3'-phosphate
  modified_base 17: mod_base = OTHER; note = 2'-O-methylcytidine-3'-phosphate
  modified_base 19: mod_base = OTHER; note = 2'-O-methyluridine-3'-phosphate
  misc_feature 1..19: note = RNA
  misc_feature 20..21: note = DNA
caggatggcttctcatcgttt

SEQ ID NO: 876 - DNA, 21 bp, synthetic construct
  source 1..21: mol_type = other DNA; note = Description of Artificial Sequence: Synthetic oligonucleotide; note = Description of Combined DNA/RNA Molecule: Synthetic oligonucleotide
  modified_base 13: mod_base = OTHER; note = 2'-O-methylcytidine-3'-phosphate
  misc_feature 1..19: note = RNA
  misc_feature 20..21: note = DNA
acgatgagaagccatcctgtt

SEQ ID NO: 877 - DNA, 21 bp, synthetic construct
  source 1..21: mol_type = other DNA; note = Description of Artificial Sequence: Synthetic oligonucleotide; note = Description of Combined DNA/RNA Molecule: Synthetic oligonucleotide
  modified_base 5: mod_base = OTHER; note = 2'-O-methyluridine-3'-phosphate
  modified_base 8: mod_base = OTHER; note = 2'-O-methylcytidine-3'-phosphate
  modified_base 9: mod_base = OTHER; note = 2'-O-methyluridine-3'-phosphate
  modified_base 10: mod_base = OTHER; note = 2'-O-methyluridine-3'-phosphate
  modified_base 11: mod_base = OTHER; note = 2'-O-methylcytidine-3'-phosphate
  modified_base 12: mod_base = OTHER; note = 2'-O-methyluridine-3'-phosphate
  modified_base 13: mod_base = OTHER; note = 2'-O-methylcytidine-3'-phosphate
  modified_base 15: mod_base = OTHER; note = 2'-O-methyluridine-3'-phosphate
  modified_base 16: mod_base = OTHER; note = 2'-O-methylcytidine-3'-phosphate
  modified_base 18: mod_base = OTHER; note = 2'-O-methyluridine-3'-phosphate
  modified_base 19: mod_base = OTHER; note = 2'-O-methylcytidine-3'-phosphate
  misc_feature 1..19: note = RNA
  misc_feature 20..21: note = DNA
aggatggcttctcatcgtctt

SEQ ID NO: 878 - DNA, 21 bp, synthetic construct
  source 1..21: mol_type = other DNA; note = Description of Artificial Sequence: Synthetic oligonucleotide; note = Description of Combined DNA/RNA Molecule: Synthetic oligonucleotide
  modified_base 14: mod_base = OTHER; note = 2'-O-methylcytidine-3'-phosphate
  misc_feature 1..19: note = RNA
  misc_feature 20..21: note = DNA
gacgatgagaagccatccttt

SEQ ID NO: 879 - DNA, 21 bp, synthetic construct
  source 1..21: mol_type = other DNA; note = Description of Artificial Sequence: Synthetic oligonucleotide; note = Description of Combined DNA/RNA Molecule: Synthetic oligonucleotide
  modified_base 5: mod_base = OTHER; note = 2'-O-methylcytidine-3'-phosphate
  modified_base 6: mod_base = OTHER; note = 2'-O-methyluridine-3'-phosphate
  modified_base 8: mod_base = OTHER; note = 2'-O-methylcytidine-3'-phosphate
  modified_base 10: mod_base = OTHER; note = 2'-O-methyluridine-3'-phosphate
  modified_base 14: mod_base = OTHER; note = 2'-O-methylcytidine-3'-phosphate
  modified_base 15: mod_base = OTHER; note = 2'-O-methyluridine-3'-phosphate
  modified_base 16: mod_base = OTHER; note = 2'-O-methylcytidine-3'-phosphate
  modified_base 18: mod_base = OTHER; note = 2'-O-methylcytidine-3'-phosphate
  misc_feature 1..19: note = RNA
  misc_feature 20..21: note = DNA
agagctgcatgggctcacatt

SEQ ID NO: 880 - DNA, 21 bp, synthetic construct
  source 1..21: mol_type = other DNA; note = Description of Artificial Sequence: Synthetic oligonucleotide; note = Description of Combined DNA/RNA Molecule: Synthetic oligonucleotide
  modified_base 9: mod_base = OTHER; note = 2'-O-methylcytidine-3'-phosphate
  modified_base 13: mod_base = OTHER; note = 2'-O-methylcytidine-3'-phosphate
  misc_feature 1..19: note = RNA
  misc_feature 20..21: note = DNA
tgtgagcccatgcagctcttt

SEQ ID NO: 881 - DNA, 21 bp, synthetic construct
  source 1..21: mol_type = other DNA; note = Description of Artificial Sequence: Synthetic oligonucleotide; note = Description of Combined DNA/RNA Molecule: Synthetic oligonucleotide
  modified_base 2: mod_base = OTHER; note = 2'-O-methylcytidine-3'-phosphate
  modified_base 3: mod_base = OTHER; note = 2'-O-methyluridine-3'-phosphate
  modified_base 5: mod_base = OTHER; note = 2'-O-methylcytidine-3'-phosphate
  modified_base 7: mod_base = OTHER; note = 2'-O-methyluridine-3'-phosphate
  modified_base 11: mod_base = OTHER; note = 2'-O-methylcytidine-3'-phosphate
  modified_base 12: mod_base = OTHER; note = 2'-O-methyluridine-3'-phosphate
  modified_base 13: mod_base = OTHER; note = 2'-O-methylcytidine-3'-phosphate
  modified_base 15: mod_base = OTHER; note = 2'-O-methylcytidine-3'-phosphate
  modified_base 18: mod_base = OTHER; note = 2'-O-methylcytidine-3'-phosphate
  modified_base 19: mod_base = OTHER; note = 2'-O-methyluridine-3'-phosphate
  misc_feature 1..19: note = RNA
  misc_feature 20..21: note = DNA
gctgcatgggctcacaacttt

SEQ ID NO: 882 - DNA, 21 bp, synthetic construct
  source 1..21: mol_type = other DNA; note = Description of Artificial Sequence: Synthetic oligonucleotide; note = Description of Combined DNA/RNA Molecule: Synthetic oligonucleotide
  modified_base 12: mod_base = OTHER; note = 2'-O-methylcytidine-3'-phosphate
  modified_base 16: mod_base = OTHER; note = 2'-O-methylcytidine-3'-phosphate
  misc_feature 1..19: note = RNA
  misc_feature 20..21: note = DNA
agttgtgagcccatgcagctt

SEQ ID NO: 883 - DNA, 21 bp, synthetic construct
  source 1..21: mol_type = other DNA; note = Description of Artificial Sequence: Synthetic oligonucleotide; note = Description of Combined DNA/RNA Molecule: Synthetic oligonucleotide
  modified_base 4: mod_base = OTHER; note = 2'-O-methyluridine-3'-phosphate
  modified_base 7: mod_base = OTHER; note = 2'-O-methylcytidine-3'-phosphate
  modified_base 8: mod_base = OTHER; note = 2'-O-methyluridine-3'-phosphate
  modified_base 9: mod_base = OTHER; note = 2'-O-methyluridine-3'-phosphate
  modified_base 10: mod_base = OTHER; note = 2'-O-methylcytidine-3'-phosphate
  modified_base 11: mod_base = OTHER; note = 2'-O-methyluridine-3'-phosphate
  modified_base 12: mod_base = OTHER; note = 2'-O-methylcytidine-3'-phosphate
  modified_base 14: mod_base = OTHER; note = 2'-O-methyluridine-3'-phosphate
  modified_base 15: mod_base = OTHER; note = 2'-O-methylcytidine-3'-phosphate
  modified_base 17: mod_base = OTHER; note = 2'-O-methyluridine-3'-phosphate
  modified_base 18: mod_base = OTHER; note = 2'-O-methylcytidine-3'-phosphate
  modified_base 19: mod_base = OTHER; note = 2'-O-methyluridine-3'-phosphate
  misc_feature 1..19: note = RNA
  misc_feature 20..21: note = DNA
ggatggcttctcatcgtcttt

SEQ ID NO: 884 - DNA, 21 bp, synthetic construct
  source 1..21: mol_type = other DNA; note = Description of Artificial Sequence: Synthetic oligonucleotide; note = Description of Combined DNA/RNA Molecule: Synthetic oligonucleotide
  modified_base 15: mod_base = OTHER; note = 2'-O-methylcytidine-3'-phosphate
  misc_feature 1..19: note = RNA
  misc_feature 20..21: note = DNA
agacgatgagaagccatcctt

SEQ ID NO: 885 - DNA, 21 bp, synthetic construct
  source 1..21: mol_type = other DNA; note = Description of Artificial Sequence: Synthetic oligonucleotide; note = Description of Combined DNA/RNA Molecule: Synthetic oligonucleotide
  modified_base 2: mod_base = OTHER; note = 2'-O-methylcytidine-3'-phosphate
  modified_base 4: mod_base = OTHER; note = 2'-O-methyluridine-3'-phosphate
  modified_base 8: mod_base = OTHER; note = 2'-O-methylcytidine-3'-phosphate
  modified_base 9: mod_base = OTHER; note = 2'-O-methyluridine-3'-phosphate
  modified_base 10: mod_base = OTHER; note = 2'-O-methylcytidine-3'-phosphate
  modified_base 12: mod_base = OTHER; note = 2'-O-methylcytidine-3'-phosphate
  modified_base 15: mod_base = OTHER; note = 2'-O-methylcytidine-3'-phosphate
  modified_base 16: mod_base = OTHER; note = 2'-O-methyluridine-3'-phosphate
  misc_feature 1..19: note = RNA
  misc_feature 20..21: note = DNA
gcatgggctcacaactgagtt

SEQ ID NO: 886 - DNA, 21 bp, synthetic construct
  source 1..21: mol_type = other DNA; note = Description of Artificial Sequence: Synthetic oligonucleotide; note = Description of Combined DNA/RNA Molecule: Synthetic oligonucleotide
  modified_base 3: mod_base = OTHER; note = 2'-O-methylcytidine-3'-phosphate
  modified_base 15: mod_base = OTHER; note = 2'-O-methylcytidine-3'-phosphate
  misc_feature 1..19: note = RNA
  misc_feature 20..21: note = DNA
ctcagttgtgagcccatgctt

SEQ ID NO: 887 - DNA, 21 bp, synthetic construct
  source 1..21: mol_type = other DNA; note = Description of Artificial Sequence: Synthetic oligonucleotide; note = Description of Combined DNA/RNA Molecule: Synthetic oligonucleotide
  modified_base 2: mod_base = OTHER; note = 2'-O-methyluridine-3'-phosphate
  modified_base 6: mod_base = OTHER; note = 2'-O-methylcytidine-3'-phosphate
  modified_base 7: mod_base = OTHER; note = 2'-O-methyluridine-3'-phosphate
  modified_base 8: mod_base = OTHER; note = 2'-O-methylcytidine-3'-phosphate
  modified_base 10: mod_base = OTHER; note = 2'-O-methylcytidine-3'-phosphate
  modified_base 13: mod_base = OTHER; note = 2'-O-methylcytidine-3'-phosphate
  modified_base 14: mod_base = OTHER; note = 2'-O-methyluridine-3'-phosphate
  misc_feature 1..19: note = RNA
  misc_feature 20..21: note = DNA
atgggctcacaactgaggatt

SEQ ID NO: 888 - DNA, 21 bp, synthetic construct
  source 1..21: mol_type = other DNA; note = Description of Artificial Sequence: Synthetic oligonucleotide; note = Description of Combined DNA/RNA Molecule: Synthetic oligonucleotide
  modified_base 5: mod_base = OTHER; note = 2'-O-methylcytidine-3'-phosphate
  modified_base 17: mod_base = OTHER; note = 2'-O-methylcytidine-3'-phosphate
  misc_feature 1..19: note = RNA
  misc_feature 20..21: note = DNA
tcctcagttgtgagcccattt

SEQ ID NO: 889 - DNA, 21 bp, synthetic construct
  source 1..21: mol_type = other DNA; note = Description of Artificial Sequence: Synthetic oligonucleotide; note = Description of Combined DNA/RNA Molecule: Synthetic oligonucleotide
  modified_base 1: mod_base = OTHER; note = 2'-O-methyluridine-3'-phosphate
  modified_base 5: mod_base = OTHER; note = 2'-O-methylcytidine-3'-phosphate
  modified_base 6: mod_base = OTHER; note = 2'-O-methyluridine-3'-phosphate
  modified_base 7: mod_base = OTHER; note = 2'-O-methylcytidine-3'-phosphate
  modified_base 9: mod_base = OTHER; note = 2'-O-methylcytidine-3'-phosphate
  modified_base 12: mod_base = OTHER; note = 2'-O-methylcytidine-3'-phosphate
  modified_base 13: mod_base = OTHER; note = 2'-O-methyluridine-3'-phosphate
  misc_feature 1..19: note = RNA
  misc_feature 20..21: note = DNA
tgggctcacaactgaggagtt

SEQ ID NO: 890 - DNA, 21 bp, synthetic construct
  source 1..21: mol_type = other DNA; note = Description of Artificial Sequence: Synthetic oligonucleotide; note = Description of Combined DNA/RNA Molecule: Synthetic oligonucleotide
  modified_base 6: mod_base = OTHER; note = 2'-O-methylcytidine-3'-phosphate
  modified_base 18: mod_base = OTHER; note = 2'-O-methylcytidine-3'-phosphate
  misc_feature 1..19: note = RNA
  misc_feature 20..21: note = DNA
ctcctcagttgtgagcccatt

SEQ ID NO: 891 - DNA, 21 bp, synthetic construct
  source 1..21: mol_type = other DNA; note = Description of Artificial Sequence: Synthetic oligonucleotide; note = Description of Combined DNA/RNA Molecule: Synthetic oligonucleotide
  modified_base 7: mod_base = OTHER; note = 2'-O-methyluridine-3'-phosphate
  modified_base 8: mod_base = OTHER; note = 2'-O-methyluridine-3'-phosphate
  modified_base 9: mod_base = OTHER; note = 2'-O-methyluridine-3'-phosphate
  modified_base 11: mod_base = OTHER; note = 2'-O-methyluridine-3'-phosphate
  misc_feature 1..19: note = RNA
  misc_feature 20..21: note = DNA
gaggaatttgtagaagggatt

SEQ ID NO: 892 - DNA, 21 bp, synthetic construct
  source 1..21: mol_type = other DNA; note = Description of Artificial Sequence: Synthetic oligonucleotide; note = Description of Combined DNA/RNA Molecule: Synthetic oligonucleotide
  modified_base 8: mod_base = OTHER; note = 2'-O-methyluridine-3'-phosphate
  modified_base 10: mod_base = OTHER; note = 2'-O-methylcytidine-3'-phosphate
  misc_feature 1..19: note = RNA
  misc_feature 20..21: note = DNA
tcccttctacaaattcctctt

SEQ ID NO: 893 - DNA, 21 bp, synthetic construct
  source 1..21: mol_type = other DNA; note = Description of Artificial Sequence: Synthetic oligonucleotide; note = Description of Combined DNA/RNA Molecule: Synthetic oligonucleotide
  modified_base 1: mod_base = OTHER; note = 2'-O-methyluridine-3'-phosphate
  modified_base 2: mod_base = OTHER; note = 2'-O-methyluridine-3'-phosphate
  modified_base 3: mod_base = OTHER; note = 2'-O-methyluridine-3'-phosphate
  modified_base 5: mod_base = OTHER; note = 2'-O-methyluridine-3'-phosphate
  modified_base 14: mod_base = OTHER; note = 2'-O-methyluridine-3'-phosphate
  modified_base 16: mod_base = OTHER; note = 2'-O-methyluridine-3'-phosphate
  modified_base 18: mod_base = OTHER; note = 2'-O-methylcytidine-3'-phosphate
  misc_feature 1..19: note = RNA
  misc_feature 20..21: note = DNA
tttgtagaagggatatacatt

SEQ ID NO: 894 - DNA, 21 bp, synthetic construct
  source 1..21: mol_type = other DNA; note = Description of Artificial Sequence: Synthetic oligonucleotide; note = Description of Combined DNA/RNA Molecule: Synthetic oligonucleotide
  modified_base 3: mod_base = OTHER; note = 2'-O-methyluridine-3'-phosphate
  modified_base 5: mod_base = OTHER; note = 2'-O-methyluridine-3'-phosphate
  modified_base 14: mod_base = OTHER; note = 2'-O-methyluridine-3'-phosphate
  modified_base 16: mod_base = OTHER; note = 2'-O-methylcytidine-3'-phosphate
  misc_feature 1..19: note = RNA
  misc_feature 20..21: note = DNA
tgtatatcccttctacaaatt

SEQ ID NO: 895 - DNA, 21 bp, synthetic construct
  source 1..21: mol_type = other DNA; note = Description of Artificial Sequence: Synthetic oligonucleotide; note = Description of Combined DNA/RNA Molecule: Synthetic oligonucleotide
  modified_base 1: mod_base = OTHER; note = 2'-O-methyluridine-3'-phosphate
  modified_base 2: mod_base = OTHER; note = 2'-O-methyluridine-3'-phosphate
  modified_base 4: mod_base = OTHER; note = 2'-O-methyluridine-3'-phosphate
  modified_base 13: mod_base = OTHER; note = 2'-O-methyluridine-3'-phosphate
  modified_base 15: mod_base = OTHER; note = 2'-O-methyluridine-3'-phosphate
  modified_base 17: mod_base = OTHER; note = 2'-O-methylcytidine-3'-phosphate
  misc_feature 1..19: note = RNA
  misc_feature 20..21: note = DNA
ttgtagaagggatatacaatt

SEQ ID NO: 896 - DNA, 21 bp, synthetic construct
  source 1..21: mol_type = other DNA; note = Description of Artificial Sequence: Synthetic oligonucleotide; note = Description of Combined DNA/RNA Molecule: Synthetic oligonucleotide
  modified_base 4: mod_base = OTHER; note = 2'-O-methyluridine-3'-phosphate
  modified_base 6: mod_base = OTHER; note = 2'-O-methyluridine-3'-phosphate
  modified_base 15: mod_base = OTHER; note = 2'-O-methyluridine-3'-phosphate
  modified_base 17: mod_base = OTHER; note = 2'-O-methylcytidine-3'-phosphate
  misc_feature 1..19: note = RNA
  misc_feature 20..21: note = DNA
ttgtatatcccttctacaatt

SEQ ID NO: 897 - DNA, 21 bp, synthetic construct
  source 1..21: mol_type = other DNA; note = Description of Artificial Sequence: Synthetic oligonucleotide; note = Description of Combined DNA/RNA Molecule: Synthetic oligonucleotide
  modified_base 1: mod_base = OTHER; note = 2'-O-methyluridine-3'-phosphate
  modified_base 3: mod_base = OTHER; note = 2'-O-methyluridine-3'-phosphate
  modified_base 12: mod_base = OTHER; note = 2'-O-methyluridine-3'-phosphate
  modified_base 14: mod_base = OTHER; note = 2'-O-methyluridine-3'-phosphate
  modified_base 16: mod_base = OTHER; note = 2'-O-methylcytidine-3'-phosphate
  misc_feature 1..19: note = RNA
  misc_feature 20..21: note = DNA
tgtagaagggatatacaaatt

SEQ ID NO: 898 - DNA, 21 bp, synthetic construct
  source 1..21: mol_type = other DNA; note = Description of Artificial Sequence: Synthetic oligonucleotide; note = Description of Combined DNA/RNA Molecule: Synthetic oligonucleotide
  modified_base 5: mod_base = OTHER; note = 2'-O-methyluridine-3'-phosphate
  modified_base 7: mod_base = OTHER; note = 2'-O-methyluridine-3'-phosphate
  modified_base 16: mod_base = OTHER; note = 2'-O-methyluridine-3'-phosphate
  modified_base 18: mod_base = OTHER; note = 2'-O-methylcytidine-3'-phosphate
  misc_feature 1..19: note = RNA
  misc_feature 20..21: note = DNA
tttgtatatcccttctacatt

SEQ ID NO: 899 - DNA, 21 bp, synthetic construct
  source 1..21: mol_type = other DNA; note = Description of Artificial Sequence: Synthetic oligonucleotide; note = Description of Combined DNA/RNA Molecule: Synthetic oligonucleotide
  modified_base 9: mod_base = OTHER; note = 2'-O-methyluridine-3'-phosphate
  modified_base 11: mod_base = OTHER; note = 2'-O-methyluridine-3'-phosphate
  modified_base 13: mod_base = OTHER; note = 2'-O-methylcytidine-3'-phosphate
  modified_base 18: mod_base = OTHER; note = 2'-O-methyluridine-3'-phosphate
  misc_feature 1..19: note = RNA
  misc_feature 20..21: note = DNA
agaagggatatacaaagtgtt

SEQ ID NO: 900 - DNA, 21 bp, synthetic construct
  source 1..21: mol_type = other DNA; note = Description of Artificial Sequence: Synthetic oligonucleotide; note = Description of Combined DNA/RNA Molecule: Synthetic oligonucleotide
  modified_base 1: mod_base = OTHER; note = 2'-O-methylcytidine-3'-phosphate
  modified_base 8: mod_base = OTHER; note = 2'-O-methyluridine-3'-phosphate
  modified_base 10: mod_base = OTHER; note = 2'-O-methyluridine-3'-phosphate
  misc_feature 1..19: note = RNA
  misc_feature 20..21: note = DNA
cactttgtatatcccttcttt

SEQ ID NO: 901 - DNA, 21 bp, synthetic construct
  source 1..21: mol_type = other DNA; note = Description of Artificial Sequence: Synthetic oligonucleotide; note = Description of Combined DNA/RNA Molecule: Synthetic oligonucleotide
  modified_base 4: mod_base = OTHER; note = 2'-O-methyluridine-3'-phosphate
  modified_base 10: mod_base = OTHER; note = 2'-O-methyluridine-3'-phosphate
  modified_base 14: mod_base = OTHER; note = 2'-O-methylcytidine-3'-phosphate
  modified_base 16: mod_base = OTHER; note = 2'-O-methylcytidine-3'-phosphate
  modified_base 17: mod_base = OTHER; note = 2'-O-methylcytidine-3'-phosphate
  misc_feature 1..19: note = RNA
  misc_feature 20..21: note = DNA
aagtggaaatagacaccaatt

SEQ ID NO: 902 - DNA, 21 bp, synthetic construct
  source 1..21: mol_type = other DNA; note = Description of Artificial Sequence: Synthetic oligonucleotide; note = Description of Combined DNA/RNA Molecule: Synthetic oligonucleotide
  modified_base 9: mod_base = OTHER; note = 2'-O-methyluridine-3'-phosphate
  modified_base 15: mod_base = OTHER; note = 2'-O-methylcytidine-3'-phosphate
  misc_feature 1..19: note = RNA
  misc_feature 20..21: note = DNA
ttggtgtctatttccactttt

SEQ ID NO: 903 - DNA, 21 bp, synthetic construct
  source 1..21: mol_type = other DNA; note = Description of Artificial Sequence: Synthetic oligonucleotide; note = Description of Combined DNA/RNA Molecule: Synthetic oligonucleotide
  modified_base 6: mod_base = OTHER; note = 2'-O-methyluridine-3'-phosphate
  modified_base 10: mod_base = OTHER; note = 2'-O-methylcytidine-3'-phosphate
  modified_base 12: mod_base = OTHER; note = 2'-O-methylcytidine-3'-phosphate
  modified_base 13: mod_base = OTHER; note = 2'-O-methylcytidine-3'-phosphate
  modified_base 17: mod_base = OTHER; note = 2'-O-methyluridine-3'-phosphate
  modified_base 18: mod_base = OTHER; note = 2'-O-methylcytidine-3'-phosphate
  modified_base 19: mod_base = OTHER; note = 2'-O-methyluridine-3'-phosphate
  misc_feature 1..19: note = RNA
  misc_feature 20..21: note = DNA
ggaaatagacaccaaatcttt

SEQ ID NO: 904 - DNA, 21 bp, synthetic construct
  source 1..21: mol_type = other DNA; note = Description of Artificial Sequence: Synthetic oligonucleotide; note = Description of Combined DNA/RNA Molecule: Synthetic oligonucleotide
  modified_base 13: mod_base = OTHER; note = 2'-O-methyluridine-3'-phosphate
  misc_feature 1..19: note = RNA
  misc_feature 20..21: note = DNA
agatttggtgtctatttcctt

SEQ ID NO: 905 - DNA, 21 bp, synthetic construct
  source 1..21: mol_type = other DNA; note = Description of Artificial Sequence: Synthetic oligonucleotide; note = Description of Combined DNA/RNA Molecule: Synthetic oligonucleotide
  modified_base 5: mod_base = OTHER; note = 2'-O-methyluridine-3'-phosphate
  modified_base 9: mod_base = OTHER; note = 2'-O-methylcytidine-3'-phosphate
  modified_base 11: mod_base = OTHER; note = 2'-O-methylcytidine-3'-phosphate
  modified_base 12: mod_base = OTHER; note = 2'-O-methylcytidine-3'-phosphate
  modified_base 16: mod_base = OTHER; note = 2'-O-methyluridine-3'-phosphate
  modified_base 17: mod_base = OTHER; note = 2'-O-methylcytidine-3'-phosphate
  modified_base 18: mod_base = OTHER; note = 2'-O-methyluridine-3'-phosphate
  modified_base 19: mod_base = OTHER; note = 2'-O-methyluridine-3'-phosphate
  misc_feature 1..19: note = RNA
  misc_feature 20..21: note = DNA
gaaatagacaccaaatctttt

SEQ ID NO: 906 - DNA, 21 bp, synthetic construct
  source 1..21: mol_type = other DNA; note = Description of Artificial Sequence: Synthetic oligonucleotide; note = Description of Combined DNA/RNA Molecule: Synthetic oligonucleotide
  modified_base 14: mod_base = OTHER; note = 2'-O-methyluridine-3'-phosphate
  misc_feature 1..19: note = RNA
  misc_feature 20..21: note = DNA
aagatttggtgtctatttctt

SEQ ID NO: 907 - DNA, 21 bp, synthetic construct
  source 1..21: mol_type = other DNA; note = Description of Artificial Sequence: Synthetic oligonucleotide; note = Description of Combined DNA/RNA Molecule: Synthetic oligonucleotide
  modified_base 2: mod_base = OTHER; note = 2'-O-methyluridine-3'-phosphate
  modified_base 6: mod_base = OTHER; note = 2'-O-methylcytidine-3'-phosphate
  modified_base 8: mod_base = OTHER; note = 2'-O-methylcytidine-3'-phosphate
  modified_base 9: mod_base = OTHER; note = 2'-O-methylcytidine-3'-phosphate
  modified_base 13: mod_base = OTHER; note = 2'-O-methyluridine-3'-phosphate
  modified_base 14: mod_base = OTHER; note = 2'-O-methylcytidine-3'-phosphate
  modified_base 15: mod_base = OTHER; note = 2'-O-methyluridine-3'-phosphate
  modified_base 16: mod_base = OTHER; note = 2'-O-methyluridine-3'-phosphate
  modified_base 18: mod_base = OTHER; note = 2'-O-methylcytidine-3'-phosphate
  modified_base 19: mod_base = OTHER; note = 2'-O-methyluridine-3'-phosphate
  misc_feature 1..19: note = RNA
  misc_feature 20..21: note = DNA
atagacaccaaatcttacttt

SEQ ID NO: 908 - DNA, 21 bp, synthetic construct
  source 1..21: mol_type = other DNA; note = Description of Artificial Sequence: Synthetic oligonucleotide; note = Description of Combined DNA/RNA Molecule: Synthetic oligonucleotide
  modified_base 3: mod_base = OTHER; note = 2'-O-methyluridine-3'-phosphate
  modified_base 17: mod_base = OTHER; note = 2'-O-methyluridine-3'-phosphate
  misc_feature 1..19: note = RNA
  misc_feature 20..21: note = DNA
agtaagatttggtgtctattt

SEQ ID NO: 909 - DNA, 21 bp, synthetic construct
  source 1..21: mol_type = other DNA; note = Description of Artificial Sequence: Synthetic oligonucleotide; note = Description of Combined DNA/RNA Molecule: Synthetic oligonucleotide
  modified_base 1: mod_base = OTHER; note = 2'-O-methyluridine-3'-phosphate
  modified_base 5: mod_base = OTHER; note = 2'-O-methylcytidine-3'-phosphate
  modified_base 7: mod_base = OTHER; note = 2'-O-methylcytidine-3'-phosphate
  modified_base 8: mod_base = OTHER; note = 2'-O-methylcytidine-3'-phosphate
  modified_base 12: mod_base = OTHER; note = 2'-O-methyluridine-3'-phosphate
  modified_base 13: mod_base = OTHER; note = 2'-O-methylcytidine-3'-phosphate
  modified_base 14: mod_base = OTHER; note = 2'-O-methyluridine-3'-phosphate
  modified_base 15: mod_base = OTHER; note = 2'-O-methyluridine-3'-phosphate
  modified_base 17: mod_base = OTHER; note = 2'-O-methylcytidine-3'-phosphate
  modified_base 18: mod_base = OTHER; note = 2'-O-methyluridine-3'-phosphate
  misc_feature 1..19: note = RNA
  misc_feature 20..21: note = DNA
tagacaccaaatcttactgtt

SEQ ID NO: 910 - DNA, 21 bp, synthetic construct
  source 1..21: mol_type = other DNA; note = Description of Artificial Sequence: Synthetic oligonucleotide; note = Description of Combined DNA/RNA Molecule: Synthetic oligonucleotide
  modified_base 1: mod_base = OTHER; note = 2'-O-methylcytidine-3'-phosphate
  modified_base 4: mod_base = OTHER; note = 2'-O-methyluridine-3'-phosphate
  modified_base 18: mod_base = OTHER; note = 2'-O-methyluridine-3'-phosphate
  misc_feature 1..19: note = RNA
  misc_feature 20..21: note = DNA
cagtaagatttggtgtctatt

SEQ ID NO: 911 - DNA, 21 bp, synthetic construct
  source 1..21: mol_type = other DNA; note = Description of Artificial Sequence: Synthetic oligonucleotide; note = Description of Combined DNA/RNA Molecule: Synthetic oligonucleotide
  modified_base 4: mod_base = OTHER; note = 2'-O-methylcytidine-3'-phosphate
  modified_base 6: mod_base = OTHER; note = 2'-O-methylcytidine-3'-phosphate
  modified_base 7: mod_base = OTHER; note = 2'-O-methylcytidine-3'-phosphate
  modified_base 11: mod_base = OTHER; note = 2'-O-methyluridine-3'-phosphate
  modified_base 12: mod_base = OTHER; note = 2'-O-methylcytidine-3'-phosphate
  modified_base 13: mod_base = OTHER; note = 2'-O-methyluridine-3'-phosphate
  modified_base 14: mod_base = OTHER; note = 2'-O-methyluridine-3'-phosphate
  modified_base 16: mod_base = OTHER; note = 2'-O-methylcytidine-3'-phosphate
  modified_base 17: mod_base = OTHER; note = 2'-O-methyluridine-3'-phosphate
  misc_feature 1..19: note = RNA
  misc_feature 20..21: note = DNA
agacaccaaatcttactggtt

SEQ ID NO: 912 - DNA, 21 bp, synthetic construct
  source 1..21: mol_type = other DNA; note = Description of Artificial Sequence: Synthetic oligonucleotide; note = Description of Combined DNA/RNA Molecule: Synthetic oligonucleotide
  modified_base 2: mod_base = OTHER; note = 2'-O-methylcytidine-3'-phosphate
  modified_base 5: mod_base = OTHER; note = 2'-O-methyluridine-3'-phosphate
  misc_feature 1..19: note = RNA
  misc_feature 20..21: note = DNA
ccagtaagatttggtgtcttt

SEQ ID NO: 913 - DNA, 21 bp, synthetic construct
  source 1..21: mol_type = other DNA; note = Description of Artificial Sequence: Synthetic oligonucleotide; note = Description of Combined DNA/RNA Molecule: Synthetic oligonucleotide
  modified_base 1: mod_base = OTHER; note = 2'-O-methyluridine-3'-phosphate
  modified_base 2: mod_base = OTHER; note = 2'-O-methyluridine-3'-phosphate
  modified_base 4: mod_base = OTHER; note = 2'-O-methylcytidine-3'-phosphate
  modified_base 5: mod_base = OTHER; note = 2'-O-methyluridine-3'-phosphate
  modified_base 12: mod_base = OTHER; note = 2'-O-methylcytidine-3'-phosphate
  modified_base 14: mod_base = OTHER; note = 2'-O-methylcytidine-3'-phosphate
  modified_base 15: mod_base = OTHER; note = 2'-O-methyluridine-3'-phosphate
  modified_base 16: mod_base = OTHER; note = 2'-O-methyluridine-3'-phosphate
  modified_base 19: mod_base = OTHER; note = 2'-O-methylcytidine-3'-phosphate
  misc_feature 1..19: note = RNA
  misc_feature 20..21: note = DNA
ttactggaaggcacttggctt

SEQ ID NO: 914 - DNA, 21 bp, synthetic construct
  source 1..21: mol_type = other DNA; note = Description of Artificial Sequence: Synthetic oligonucleotide; note = Description of Combined DNA/RNA Molecule: Synthetic oligonucleotide
  modified_base 3: mod_base = OTHER; note = 2'-O-methylcytidine-3'-phosphate
  modified_base 14: mod_base = OTHER; note = 2'-O-methylcytidine-3'-phosphate
  modified_base 17: mod_base = OTHER; note = 2'-O-methyluridine-3'-phosphate
  misc_feature 1..19: note = RNA
  misc_feature 20..21: note = DNA
gccaagtgccttccagtaatt

SEQ ID NO: 915 - DNA, 21 bp, synthetic construct
  source 1..21: mol_type = other DNA; note = Description of Artificial Sequence: Synthetic oligonucleotide; note = Description of Combined DNA/RNA Molecule: Synthetic oligonucleotide
  modified_base 1: mod_base = OTHER; note = 2'-O-methyluridine-3'-phosphate
  modified_base 2: mod_base = OTHER; note = 2'-O-methyluridine-3'-phosphate
  modified_base 3: mod_base = OTHER; note = 2'-O-methylcytidine-3'-phosphate
  modified_base 4: mod_base = OTHER; note = 2'-O-methyluridine-3'-phosphate
  modified_base 5: mod_base = OTHER; note = 2'-O-methylcytidine-3'-phosphate
  modified_base 7: mod_base = OTHER; note = 2'-O-methyluridine-3'-phosphate
  modified_base 8: mod_base = OTHER; note = 2'-O-methylcytidine-3'-phosphate
  modified_base 10: mod_base = OTHER; note = 2'-O-methyluridine-3'-phosphate
  modified_base 11: mod_base = OTHER; note = 2'-O-methylcytidine-3'-phosphate
  modified_base 12: mod_base = OTHER; note = 2'-O-methyluridine-3'-phosphate
  modified_base 14: mod_base = OTHER; note = 2'-O-methylcytidine-3'-phosphate
  modified_base 15: mod_base = OTHER; note = 2'-O-methyluridine-3'-phosphate
  modified_base 16: mod_base = OTHER; note = 2'-O-methylcytidine-3'-phosphate
  modified_base 17: mod_base = OTHER; note = 2'-O-methylcytidine-3'-phosphate
  modified_base 18: mod_base = OTHER; note = 2'-O-methyluridine-3'-phosphate
  modified_base 19: mod_base = OTHER; note = 2'-O-methylcytidine-3'-phosphate
  misc_feature 1..19: note = RNA
  misc_feature 20..21: note = DNA
ttctcatcgtctgctcctctt

SEQ ID NO: 916 - DNA, 21 bp, synthetic construct
  source 1..21: mol_type = other DNA; note = Description of Artificial Sequence: Synthetic oligonucleotide; note = Description of Combined DNA/RNA Molecule: Synthetic oligonucleotide
  modified_base 7: mod_base = OTHER; note = 2'-O-methylcytidine-3'-phosphate
  misc_feature 1..19: note = RNA
  misc_feature 20..21: note = DNA
gaggagcagacgatgagaatt

SEQ ID NO: 917 - DNA, 21 bp, synthetic construct
  source 1..21: mol_type = other DNA; note = Description of Artificial Sequence: Synthetic oligonucleotide; note = Description of Combined DNA/RNA Molecule: Synthetic oligonucleotide
  modified_base 7: mod_base = OTHER; note = 2'-O-methylcytidine-3'-phosphate
  modified_base 9: mod_base = OTHER; note = 2'-O-methylcytidine-3'-phosphate
  modified_base 10: mod_base = OTHER; note = 2'-O-methyluridine-3'-phosphate
  modified_base 11: mod_base = OTHER; note = 2'-O-methyluridine-3'-phosphate
  modified_base 14: mod_base = OTHER; note = 2'-O-methylcytidine-3'-phosphate
  modified_base 16: mod_base = OTHER; note = 2'-O-methyluridine-3'-phosphate
  modified_base 17: mod_base = OTHER; note = 2'-O-methylcytidine-3'-phosphate
  modified_base 18: mod_base = OTHER; note = 2'-O-methyluridine-3'-phosphate
  modified_base 19: mod_base = OTHER; note = 2'-O-methylcytidine-3'-phosphate
  misc_feature 1..19: note = RNA
  misc_feature 20..21: note = DNA
ggaaggcacttggcatctctt

SEQ ID NO: 918 - DNA, 21 bp, synthetic construct
  source 1..21: mol_type = other DNA; note = Description of Artificial Sequence: Synthetic oligonucleotide; note = Description of Combined DNA/RNA Molecule: Synthetic oligonucleotide
  modified_base 8: mod_base = OTHER; note = 2'-O-methylcytidine-3'-phosphate
  misc_feature 1..19: note = RNA
  misc_feature 20..21: note = DNA
gagatgccaagtgccttcctt

SEQ ID NO: 919 - DNA, 21 bp, synthetic construct
  source 1..21: mol_type = other DNA; note = Description of Artificial Sequence: Synthetic oligonucleotide; note = Description of Combined DNA/RNA Molecule: Synthetic oligonucleotide
  modified_base 3: mod_base = OTHER; note = 2'-O-methylcytidine-3'-phosphate
  modified_base 5: mod_base = OTHER; note = 2'-O-methylcytidine-3'-phosphate
  modified_base 6: mod_base = OTHER; note = 2'-O-methyluridine-3'-phosphate
  modified_base 7: mod_base = OTHER; note = 2'-O-methyluridine-3'-phosphate
  modified_base 10: mod_base = OTHER; note = 2'-O-methylcytidine-3'-phosphate
  modified_base 12: mod_base = OTHER; note = 2'-O-methyluridine-3'-phosphate
  modified_base 13: mod_base = OTHER; note = 2'-O-methylcytidine-3'-phosphate
  modified_base 14: mod_base = OTHER; note = 2'-O-methyluridine-3'-phosphate
  modified_base 15: mod_base = OTHER; note = 2'-O-methylcytidine-3'-phosphate
  modified_base 16: mod_base = OTHER; note = 2'-O-methylcytidine-3'-phosphate
  modified_base 17: mod_base = OTHER; note = 2'-O-methylcytidine-3'-phosphate
  modified_base 18: mod_base = OTHER; note = 2'-O-methylcytidine-3'-phosphate
  misc_feature 1..19: note = RNA
  misc_feature 20..21: note = DNA
ggcacttggcatctccccatt

SEQ ID NO: 920 - DNA, 21 bp, synthetic construct
  source 1..21: mol_type = other DNA; note = Description of Artificial Sequence: Synthetic oligonucleotide; note = Description of Combined DNA/RNA Molecule: Synthetic oligonucleotide
  modified_base 12: mod_base = OTHER; note = 2'-O-methylcytidine-3'-phosphate
  misc_feature 1..19: note = RNA
  misc_feature 20..21: note = DNA
tggggagatgccaagtgcctt

SEQ ID NO: 921 - DNA, 21 bp, synthetic construct
  source 1..21: mol_type = other DNA; note = Description of Artificial Sequence: Synthetic oligonucleotide; note = Description of Combined DNA/RNA Molecule: Synthetic oligonucleotide
  modified_base 3: mod_base = OTHER; note = 2'-O-methylcytidine-3'-phosphate
  modified_base 5: mod_base = OTHER; note = 2'-O-methyluridine-3'-phosphate
  modified_base 6: mod_base = OTHER; note = 2'-O-methylcytidine-3'-phosphate
  modified_base 7: mod_base = OTHER; note = 2'-O-methyluridine-3'-phosphate
  modified_base 8: mod_base = OTHER; note = 2'-O-methylcytidine-3'-phosphate
  modified_base 9: mod_base = OTHER; note = 2'-O-methylcytidine-3'-phosphate
  modified_base 10: mod_base = OTHER; note = 2'-O-methylcytidine-3'-phosphate
  modified_base 11: mod_base = OTHER; note = 2'-O-methylcytidine-3'-phosphate
  modified_base 13: mod_base = OTHER; note = 2'-O-methyluridine-3'-phosphate
  modified_base 14: mod_base = OTHER; note = 2'-O-methyluridine-3'-phosphate
  modified_base 15: mod_base = OTHER; note = 2'-O-methylcytidine-3'-phosphate
  modified_base 16: mod_base = OTHER; note = 2'-O-methylcytidine-3'-phosphate
  modified_base 18: mod_base = OTHER; note = 2'-O-methyluridine-3'-phosphate
  misc_feature 1..19: note = RNA
  misc_feature 20..21: note = DNA
ggcatctccccattccatgtt

SEQ ID NO: 922 - DNA, 21 bp, synthetic construct
  source 1..21: mol_type = other DNA; note = Description of Artificial Sequence: Synthetic oligonucleotide; note = Description of Combined DNA/RNA Molecule: Synthetic oligonucleotide
  modified_base 1: mod_base = OTHER; note = 2'-O-methylcytidine-3'-phosphate
  misc_feature 1..19: note = RNA
  misc_feature 20..21: note = DNA
catggaatggggagatgcctt

SEQ ID NO: 923 - DNA, 21 bp, synthetic construct
  source 1..21: mol_type = other DNA; note = Description of Artificial Sequence: Synthetic oligonucleotide; note = Description of Combined DNA/RNA Molecule: Synthetic oligonucleotide
  modified_base 2: mod_base = OTHER; note = 2'-O-methylcytidine-3'-phosphate
  modified_base 4: mod_base = OTHER; note = 2'-O-methyluridine-3'-phosphate
  modified_base 5: mod_base = OTHER; note = 2'-O-methylcytidine-3'-phosphate
  modified_base 6: mod_base = OTHER; note = 2'-O-methyluridine-3'-phosphate
  modified_base 7: mod_base = OTHER; note = 2'-O-methylcytidine-3'-phosphate
  modified_base 8: mod_base = OTHER; note = 2'-O-methylcytidine-3'-phosphate
  modified_base 9: mod_base = OTHER; note = 2'-O-methylcytidine-3'-phosphate
  modified_base 10: mod_base = OTHER; note = 2'-O-methylcytidine-3'-phosphate
  modified_base 12: mod_base = OTHER; note = 2'-O-methyluridine-3'-phosphate
  modified_base 13: mod_base = OTHER; note = 2'-O-methyluridine-3'-phosphate
  modified_base 14: mod_base = OTHER; note = 2'-O-methylcytidine-3'-phosphate
  modified_base 15: mod_base = OTHER; note = 2'-O-methylcytidine-3'-phosphate
  modified_base 17: mod_base = OTHER; note = 2'-O-methyluridine-3'-phosphate
  misc_feature 1..19: note = RNA
  misc_feature 20..21: note = DNA
gcatctccccattccatgatt

SEQ ID NO: 924 - DNA, 21 bp, synthetic construct
  source 1..21: mol_type = other DNA; note = Description of Artificial Sequence: Synthetic oligonucleotide; note = Description of Combined DNA/RNA Molecule: Synthetic oligonucleotide
  modified_base 2: mod_base = OTHER; note = 2'-O-methylcytidine-3'-phosphate
  misc_feature 1..19: note = RNA
  misc_feature 20..21: note = DNA
tcatggaatggggagatgctt

SEQ ID NO: 925 - DNA, 21 bp, synthetic construct
  source 1..21: mol_type = other DNA; note = Description of Artificial Sequence: Synthetic oligonucleotide; note = Description of Combined DNA/RNA Molecule: Synthetic oligonucleotide
  modified_base 1: mod_base = OTHER; note = 2'-O-methylcytidine-3'-phosphate
  modified_base 3: mod_base = OTHER; note = 2'-O-methyluridine-3'-phosphate
  modified_base 4: mod_base = OTHER; note = 2'-O-methylcytidine-3'-phosphate
  modified_base 5: mod_base = OTHER; note = 2'-O-methyluridine-3'-phosphate
  modified_base 6: mod_base = OTHER; note = 2'-O-methylcytidine-3'-phosphate
  modified_base 7: mod_base = OTHER; note = 2'-O-methylcytidine-3'-phosphate
  modified_base 8: mod_base = OTHER; note = 2'-O-methylcytidine-3'-phosphate
  modified_base 9: mod_base = OTHER; note = 2'-O-methylcytidine-3'-phosphate
  modified_base 11: mod_base = OTHER; note = 2'-O-methyluridine-3'-phosphate
  modified_base 12: mod_base = OTHER; note = 2'-O-methyluridine-3'-phosphate
  modified_base 13: mod_base = OTHER; note = 2'-O-methylcytidine-3'-phosphate
  modified_base 14: mod_base = OTHER; note = 2'-O-methylcytidine-3'-phosphate
  modified_base 16: mod_base = OTHER; note = 2'-O-methyluridine-3'-phosphate
  misc_feature 1..19: note = RNA
  misc_feature 20..21: note = DNA
catctccccattccatgagtt

SEQ ID NO: 926 - DNA, 21 bp, synthetic construct
  source 1..21: mol_type = other DNA; note = Description of Artificial Sequence: Synthetic oligonucleotide; note = Description of Combined DNA/RNA Molecule: Synthetic oligonucleotide
  modified_base 3: mod_base = OTHER; note = 2'-O-methylcytidine-3'-phosphate
  misc_feature 1..19: note = RNA
  misc_feature 20..21: note = DNA
ctcatggaatggggagatgtt

SEQ ID NO: 927 - DNA, 21 bp, synthetic construct
  source 1..21: mol_type = other DNA; note = Description of Artificial Sequence: Synthetic oligonucleotide; note = Description of Combined DNA/RNA Molecule: Synthetic oligonucleotide
  modified_base 2: mod_base = OTHER; note = 2'-O-methyluridine-3'-phosphate
  modified_base 3: mod_base = OTHER; note = 2'-O-methylcytidine-3'-phosphate
  modified_base 4: mod_base = OTHER; note = 2'-O-methyluridine-3'-phosphate
  modified_base 5: mod_base = OTHER; note = 2'-O-methylcytidine-3'-phosphate
  modified_base 6: mod_base = OTHER; note = 2'-O-methylcytidine-3'-phosphate
  modified_base 7: mod_base = OTHER; note = 2'-O-methylcytidine-3'-phosphate
  modified_base 8: mod_base = OTHER; note = 2'-O-methylcytidine-3'-phosphate
  modified_base 10: mod_base = OTHER; note = 2'-O-methyluridine-3'-phosphate
  modified_base 11: mod_base = OTHER; note = 2'-O-methyluridine-3'-phosphate
  modified_base 12: mod_base = OTHER; note = 2'-O-methylcytidine-3'-phosphate
  modified_base 13: mod_base = OTHER; note = 2'-O-methylcytidine-3'-phosphate
  modified_base 15: mod_base = OTHER; note = 2'-O-methyluridine-3'-phosphate
  modified_base 19: mod_base = OTHER; note = 2'-O-methylcytidine-3'-phosphate
  misc_feature 1..19: note = RNA
  misc_feature 20..21: note = DNA
atctccccattccatgagctt

SEQ ID NO: 928 - DNA, 21 bp, synthetic construct
  source 1..21: mol_type = other DNA; note = Description of Artificial Sequence: Synthetic oligonucleotide; note = Description of Combined DNA/RNA Molecule: Synthetic oligonucleotide
  modified_base 4: mod_base = OTHER; note = 2'-O-methylcytidine-3'-phosphate
  misc_feature 1..19: note = RNA
  misc_feature 20..21: note = DNA
gctcatggaatggggagattt

SEQ ID NO: 929 - DNA, 21 bp, synthetic construct
  source 1..21: mol_type = other DNA; note = Description of Artificial Sequence: Synthetic oligonucleotide; note = Description of Combined DNA/RNA Molecule: Synthetic oligonucleotide
  modified_base 1: mod_base = OTHER; note = 2'-O-methylcytidine-3'-phosphate
  modified_base 2: mod_base = OTHER; note = 2'-O-methyluridine-3'-phosphate
  modified_base 3: mod_base = OTHER; note = 2'-O-methylcytidine-3'-phosphate
  modified_base 4: mod_base = OTHER; note = 2'-O-methylcytidine-3'-phosphate
  modified_base 5: mod_base = OTHER; note = 2'-O-methylcytidine-3'-phosphate
  modified_base 6: mod_base = OTHER; note = 2'-O-methylcytidine-3'-phosphate
  modified_base 8: mod_base = OTHER; note = 2'-O-methyluridine-3'-phosphate
  modified_base 9: mod_base = OTHER; note = 2'-O-methyluridine-3'-phosphate
  modified_base 10: mod_base = OTHER; note = 2'-O-methylcytidine-3'-phosphate
  modified_base 11: mod_base = OTHER; note = 2'-O-methylcytidine-3'-phosphate
  modified_base 13: mod_base = OTHER; note = 2'-O-methyluridine-3'-phosphate
  modified_base 17: mod_base = OTHER; note = 2'-O-methylcytidine-3'-phosphate
  modified_base 19: mod_base = OTHER; note = 2'-O-methyluridine-3'-phosphate
  misc_feature 1..19: note = RNA
  misc_feature 20..21: note = DNA
ctccccattccatgagcattt

SEQ ID NO: 930 - DNA, 21 bp, synthetic construct
  source 1..21: mol_type = other DNA; note = Description of Artificial Sequence: Synthetic oligonucleotide; note = Description of Combined DNA/RNA Molecule: Synthetic oligonucleotide
  modified_base 6: mod_base = OTHER; note = 2'-O-methylcytidine-3'-phosphate
  misc_feature 1..19: note = RNA
  misc_feature 20..21: note = DNA
atgctcatggaatggggagtt

SEQ ID NO: 931 - DNA, 21 bp, synthetic construct
  source 1..21: mol_type = other DNA; note = Description of Artificial Sequence: Synthetic oligonucleotide; note = Description of Combined DNA/RNA Molecule: Synthetic oligonucleotide
  modified_base 1: mod_base = OTHER; note = 2'-O-methylcytidine-3'-phosphate
  modified_base 2: mod_base = OTHER; note = 2'-O-methylcytidine-3'-phosphate
  modified_base 3: mod_base = OTHER; note = 2'-O-methylcytidine-3'-phosphate
  modified_base 5: mod_base = OTHER; note = 2'-O-methyluridine-3'-phosphate
  modified_base 6: mod_base = OTHER; note = 2'-O-methyluridine-3'-phosphate
  modified_base 7: mod_base = OTHER; note = 2'-O-methylcytidine-3'-phosphate
  modified_base 8: mod_base = OTHER; note = 2'-O-methylcytidine-3'-phosphate
  modified_base 10: mod_base = OTHER; note = 2'-O-methyluridine-3'-phosphate
  modified_base 14: mod_base = OTHER; note = 2'-O-methylcytidine-3'-phosphate
  modified_base 16: mod_base = OTHER; note = 2'-O-methyluridine-3'-phosphate
  modified_base 18: mod_base = OTHER; note = 2'-O-methylcytidine-3'-phosphate
  misc_feature 1..19: note = RNA
  misc_feature 20..21: note = DNA
cccattccatgagcatgcatt

SEQ ID NO: 932 - DNA, 21 bp, synthetic construct
  source 1..21: mol_type = other DNA; note = Description of Artificial Sequence: Synthetic oligonucleotide; note = Description of Combined DNA/RNA Molecule: Synthetic oligonucleotide
  modified_base 3: mod_base = OTHER; note = 2'-O-methylcytidine-3'-phosphate
  modified_base 9: mod_base = OTHER; note = 2'-O-methylcytidine-3'-phosphate
  misc_feature 1..19: note = RNA
  misc_feature 20..21: note = DNA
tgcatgctcatggaatgggtt

SEQ ID NO: 933 - DNA, 21 bp, synthetic construct
  source 1..21: mol_type = other DNA; note = Description of Artificial Sequence: Synthetic oligonucleotide; note = Description of Combined DNA/RNA Molecule: Synthetic oligonucleotide
  modified_base 1: mod_base = OTHER; note = 2'-O-methylcytidine-3'-phosphate
  modified_base 2: mod_base = OTHER; note = 2'-O-methylcytidine-3'-phosphate
  modified_base 4: mod_base = OTHER; note = 2'-O-methyluridine-3'-phosphate
  modified_base 8: mod_base = OTHER; note = 2'-O-methylcytidine-3'-phosphate
  modified_base 10: mod_base = OTHER; note = 2'-O-methyluridine-3'-phosphate
  modified_base 12: mod_base = OTHER; note = 2'-O-methylcytidine-3'-phosphate
  modified_base 18: mod_base = OTHER; note = 2'-O-methyluridine-3'-phosphate
  misc_feature 1..19: note = RNA
  misc_feature 20..21: note = DNA
ccatgagcatgcagaggtgtt

SEQ ID NO: 934 - DNA, 21 bp, synthetic construct
  source 1..21: mol_type = other DNA; note = Description of Artificial Sequence: Synthetic oligonucleotide; note = Description of Combined DNA/RNA Molecule: Synthetic oligonucleotide
  modified_base 1: mod_base = OTHER; note = 2'-O-methylcytidine-3'-phosphate
  modified_base 9: mod_base = OTHER; note = 2'-O-methylcytidine-3'-phosphate
  modified_base 15: mod_base = OTHER; note = 2'-O-methylcytidine-3'-phosphate
  misc_feature 1..19: note = RNA
  misc_feature 20..21: note = DNA
cacctctgcatgctcatggtt

SEQ ID NO: 935 - DNA, 21 bp, synthetic construct
  source 1..21: mol_type = other DNA; note = Description of Artificial Sequence: Synthetic oligonucleotide; note = Description of Combined DNA/RNA Molecule: Synthetic oligonucleotide
  modified_base 3: mod_base = OTHER; note = 2'-O-methylcytidine-3'-phosphate
  modified_base 5: mod_base = OTHER; note = 2'-O-methyluridine-3'-phosphate
  modified_base 7: mod_base = OTHER; note = 2'-O-methylcytidine-3'-phosphate
  modified_base 13: mod_base = OTHER; note = 2'-O-methyluridine-3'-phosphate
  modified_base 16: mod_base = OTHER; note = 2'-O-methyluridine-3'-phosphate
  modified_base 18: mod_base = OTHER; note = 2'-O-methyluridine-3'-phosphate
  modified_base 19: mod_base = OTHER; note = 2'-O-methyluridine-3'-phosphate
  misc_feature 1..19: note = RNA
  misc_feature 20..21: note = DNA
agcatgcagaggtggtatttt

SEQ ID NO: 936 - DNA, 21 bp, synthetic construct
  source 1..21: mol_type = other DNA; note = Description of Artificial Sequence: Synthetic oligonucleotide; note = Description of Combined DNA/RNA Molecule: Synthetic oligonucleotide
  modified_base 3: mod_base = OTHER; note = 2'-O-methyluridine-3'-phosphate
  modified_base 6: mod_base = OTHER; note = 2'-O-methylcytidine-3'-phosphate
  modified_base 14: mod_base = OTHER; note = 2'-O-methylcytidine-3'-phosphate
  misc_feature 1..19: note = RNA
  misc_feature 20..21: note = DNA
aataccacctctgcatgcttt

SEQ ID NO: 937 - DNA, 21 bp, synthetic construct
  source 1..21: mol_type = other DNA; note = Description of Artificial Sequence: Synthetic oligonucleotide; note = Description of Combined DNA/RNA Molecule: Synthetic oligonucleotide
  modified_base 1: mod_base = OTHER; note = 2'-O-methylcytidine-3'-phosphate
  modified_base 3: mod_base = OTHER; note = 2'-O-methyluridine-3'-phosphate
  modified_base 5: mod_base = OTHER; note = 2'-O-methylcytidine-3'-phosphate
  modified_base 11: mod_base = OTHER; note = 2'-O-methyluridine-3'-phosphate
  modified_base 14: mod_base = OTHER; note = 2'-O-methyluridine-3'-phosphate
  modified_base 16: mod_base = OTHER; note = 2'-O-methyluridine-3'-phosphate
  modified_base 17: mod_base = OTHER; note = 2'-O-methyluridine-3'-phosphate
  modified_base 18: mod_base = OTHER; note = 2'-O-methylcytidine-3'-phosphate
  misc_feature 1..19: note = RNA
  misc_feature 20..21: note = DNA
catgcagaggtggtattcatt

SEQ ID NO: 938 - DNA, 21 bp, synthetic construct
  source 1..21: mol_type = other DNA; note = Description of Artificial Sequence: Synthetic oligonucleotide; note = Description of Combined DNA/RNA Molecule: Synthetic oligonucleotide
  modified_base 5: mod_base = OTHER; note = 2'-O-methyluridine-3'-phosphate
  modified_base 8: mod_base = OTHER; note = 2'-O-methylcytidine-3'-phosphate
  modified_base 16: mod_base = OTHER; note = 2'-O-methylcytidine-3'-phosphate
  misc_feature 1..19: note = RNA
  misc_feature 20..21: note = DNA
tgaataccacctctgcatgtt

SEQ ID NO: 939 - DNA, 21 bp, synthetic construct
  source 1..21: mol_type = other DNA; note = Description of Artificial Sequence: Synthetic oligonucleotide; note = Description of Combined DNA/RNA Molecule: Synthetic oligonucleotide
  modified_base 2: mod_base = OTHER; note = 2'-O-methyluridine-3'-phosphate
  modified_base 4: mod_base = OTHER; note = 2'-O-methylcytidine-3'-phosphate
  modified_base 10: mod_base = OTHER; note = 2'-O-methyluridine-3'-phosphate
  modified_base 13: mod_base = OTHER; note = 2'-O-methyluridine-3'-phosphate
  modified_base 15: mod_base = OTHER; note = 2'-O-methyluridine-3'-phosphate
  modified_base 16: mod_base = OTHER; note = 2'-O-methyluridine-3'-phosphate
  modified_base 17: mod_base = OTHER; note = 2'-O-methylcytidine-3'-phosphate
  modified_base 19: mod_base = OTHER; note = 2'-O-methylcytidine-3'-phosphate
  misc_feature 1..19: note = RNA
  misc_feature 20..21: note = DNA
atgcagaggtggtattcactt

SEQ ID NO: 940 - DNA, 21 bp, synthetic construct
  source 1..21: mol_type = other DNA; note = Description of Artificial Sequence: Synthetic oligonucleotide; note = Description of Combined DNA/RNA Molecule: Synthetic oligonucleotide
  modified_base 6: mod_base = OTHER; note = 2'-O-methyluridine-3'-phosphate
  modified_base 9: mod_base = OTHER; note = 2'-O-methylcytidine-3'-phosphate
  modified_base 17: mod_base = OTHER; note = 2'-O-methylcytidine-3'-phosphate
  misc_feature 1..19: note = RNA
  misc_feature 20..21: note = DNA
gtgaataccacctctgcattt

SEQ ID NO: 941 - DNA, 21 bp, synthetic construct
  source 1..21: mol_type = other DNA; note = Description of Artificial Sequence: Synthetic oligonucleotide; note = Description of Combined DNA/RNA Molecule: Synthetic oligonucleotide
  modified_base 3: mod_base = OTHER; note = 2'-O-methyluridine-3'-phosphate
  modified_base 6: mod_base = OTHER; note = 2'-O-methyluridine-3'-phosphate
  modified_base 8: mod_base = OTHER; note = 2'-O-methyluridine-3'-phosphate
  modified_base 9: mod_base = OTHER; note = 2'-O-methyluridine-3'-phosphate
  modified_base 10: mod_base = OTHER; note = 2'-O-methylcytidine-3'-phosphate
  modified_base 12: mod_base = OTHER; note = 2'-O-methylcytidine-3'-phosphate
  modified_base 15: mod_base = OTHER; note = 2'-O-methylcytidine-3'-phosphate
  modified_base 16: mod_base = OTHER; note = 2'-O-methylcytidine-3'-phosphate
  modified_base 19: mod_base = OTHER; note = 2'-O-methylcytidine-3'-phosphate
  misc_feature 1..19: note = RNA
  misc_feature 20..21: note = DNA
ggtggtattcacagccaactt

SEQ ID NO: 942 - DNA, 21 bp, synthetic construct
  source 1..21: mol_type = other DNA; note = Description of Artificial Sequence: Synthetic oligonucleotide; note = Description of Combined DNA/RNA Molecule: Synthetic oligonucleotide
  modified_base 13: mod_base = OTHER; note = 2'-O-methyluridine-3'-phosphate
  modified_base 16: mod_base = OTHER; note = 2'-O-methylcytidine-3'-phosphate
  misc_feature 1..19: note = RNA
  misc_feature 20..21: note = DNA
gttggctgtgaataccacctt

SEQ ID NO: 943 - DNA, 21 bp, synthetic construct
  source 1..21: mol_type = other DNA; note = Description of Artificial Sequence: Synthetic oligonucleotide; note = Description of Combined DNA/RNA Molecule: Synthetic oligonucleotide
  modified_base 2: mod_base = OTHER; note = 2'-O-methyluridine-3'-phosphate
  modified_base 5: mod_base = OTHER; note = 2'-O-methyluridine-3'-phosphate
  modified_base 7: mod_base = OTHER; note = 2'-O-methyluridine-3'-phosphate
  modified_base 8: mod_base = OTHER; note = 2'-O-methyluridine-3'-phosphate
  modified_base 9: mod_base = OTHER; note = 2'-O-methylcytidine-3'-phosphate
  modified_base 11: mod_base = OTHER; note = 2'-O-methylcytidine-3'-phosphate
  modified_base 14: mod_base = OTHER; note = 2'-O-methylcytidine-3'-phosphate
  modified_base 15: mod_base = OTHER; note = 2'-O-methylcytidine-3'-phosphate
  modified_base 18: mod_base = OTHER; note = 2'-O-methylcytidine-3'-phosphate
  misc_feature 1..19: note = RNA
  misc_feature 20..21: note = DNA
gtggtattcacagccaacgtt

SEQ ID NO: 944 - DNA, 21 bp, synthetic construct
  source 1..21: mol_type = other DNA; note = Description of Artificial Sequence: Synthetic oligonucleotide; note = Description of Combined DNA/RNA Molecule: Synthetic oligonucleotide
  modified_base 14: mod_base = OTHER; note = 2'-O-methyluridine-3'-phosphate
  modified_base 17: mod_base = OTHER; note = 2'-O-methylcytidine-3'-phosphate
  misc_feature 1..19: note = RNA
  misc_feature 20..21: note = DNA
cgttggctgtgaataccactt

SEQ ID NO: 945 - DNA, 21 bp, synthetic construct
  source 1..21: mol_type = other DNA; note = Description of Artificial Sequence: Synthetic oligonucleotide; note = Description of Combined DNA/RNA Molecule: Synthetic oligonucleotide
  modified_base 1: mod_base = OTHER; note = 2'-O-methyluridine-3'-phosphate
  modified_base 4: mod_base = OTHER; note = 2'-O-methyluridine-3'-phosphate
  modified_base 6: mod_base = OTHER; note = 2'-O-methyluridine-3'-phosphate
  modified_base 7: mod_base = OTHER; note = 2'-O-methyluridine-3'-phosphate
  modified_base 8: mod_base = OTHER; note = 2'-O-methylcytidine-3'-phosphate
  modified_base 10: mod_base = OTHER; note = 2'-O-methylcytidine-3'-phosphate
  modified_base 13: mod_base = OTHER; note = 2'-O-methylcytidine-3'-phosphate
  modified_base 14: mod_base = OTHER; note = 2'-O-methylcytidine-3'-phosphate
  modified_base 17: mod_base = OTHER; note = 2'-O-methylcytidine-3'-phosphate
  misc_feature 1..19: note = RNA
  misc_feature 20..21: note = DNA
tggtattcacagccaacgatt

SEQ ID NO: 946 - DNA, 21 bp, synthetic construct
  source 1..21: mol_type = other DNA; note = Description of Artificial Sequence: Synthetic oligonucleotide; note = Description of Combined DNA/RNA Molecule: Synthetic oligonucleotide
  modified_base 15: mod_base = OTHER; note = 2'-O-methyluridine-3'-phosphate
  modified_base 18: mod_base = OTHER; note = 2'-O-methylcytidine-3'-phosphate
  misc_feature 1..19: note = RNA
  misc_feature 20..21: note = DNA
tcgttggctgtgaataccatt

SEQ ID NO: 947 - DNA, 21 bp, synthetic construct
  source 1..21: mol_type = other DNA; note = Description of Artificial Sequence: Synthetic oligonucleotide; note = Description of Combined DNA/RNA Molecule: Synthetic oligonucleotide
  modified_base 3: mod_base = OTHER; note = 2'-O-methyluridine-3'-phosphate
  modified_base 5: mod_base = OTHER; note = 2'-O-methyluridine-3'-phosphate
  modified_base 6: mod_base = OTHER; note = 2'-O-methyluridine-3'-phosphate
  modified_base 7: mod_base = OTHER; note = 2'-O-methylcytidine-3'-phosphate
  modified_base 9: mod_base = OTHER; note = 2'-O-methylcytidine-3'-phosphate
  modified_base 12: mod_base = OTHER; note = 2'-O-methylcytidine-3'-phosphate
  modified_base 13: mod_base = OTHER; note = 2'-O-methylcytidine-3'-phosphate
  modified_base 16: mod_base = OTHER; note = 2'-O-methylcytidine-3'-phosphate
  modified_base 19: mod_base = OTHER; note = 2'-O-methylcytidine-3'-phosphate
  misc_feature 1..19: note = RNA
  misc_feature 20..21: note = DNA
ggtattcacagccaacgactt

SEQ ID NO: 948 - DNA, 21 bp, synthetic construct
  source 1..21: mol_type = other DNA; note = Description of Artificial Sequence: Synthetic oligonucleotide; note = Description of Combined DNA/RNA Molecule: Synthetic oligonucleotide
  modified_base 16: mod_base = OTHER; note = 2'-O-methyluridine-3'-phosphate
  misc_feature 1..19: note = RNA
  misc_feature 20..21: note = DNA
gtcgttggctgtgaatacctt

SEQ ID NO: 949 - DNA, 21 bp, synthetic construct
  source 1..21: mol_type = other DNA; note = Description of Artificial Sequence: Synthetic oligonucleotide; note = Description of Combined DNA/RNA Molecule: Synthetic oligonucleotide
  modified_base 2: mod_base = OTHER; note = 2'-O-methyluridine-3'-phosphate
  modified_base 4: mod_base = OTHER; note = 2'-O-methyluridine-3'-phosphate
  modified_base 5: mod_base = OTHER; note = 2'-O-methyluridine-3'-phosphate
  modified_base 6: mod_base = OTHER; note = 2'-O-methylcytidine-3'-phosphate
  modified_base 8: mod_base = OTHER; note = 2'-O-methylcytidine-3'-phosphate
  modified_base 11: mod_base = OTHER; note = 2'-O-methylcytidine-3'-phosphate
  modified_base 12: mod_base = OTHER; note = 2'-O-methylcytidine-3'-phosphate
  modified_base 15: mod_base = OTHER; note = 2'-O-methylcytidine-3'-phosphate
  modified_base 18: mod_base = OTHER; note = 2'-O-methylcytidine-3'-phosphate
  modified_base 19: mod_base = OTHER; note = 2'-O-methyluridine-3'-phosphate
  misc_feature 1..19: note = RNA
  misc_feature 20..21: note = DNA
gtattcacagccaacgacttt

SEQ ID NO: 950 - DNA, 21 bp, synthetic construct
  source 1..21: mol_type = other DNA; note = Description of Artificial Sequence: Synthetic oligonucleotide; note = Description of Combined DNA/RNA Molecule: Synthetic oligonucleotide
  modified_base 17: mod_base = OTHER; note = 2'-O-methyluridine-3'-phosphate
  misc_feature 1..19: note = RNA
  misc_feature 20..21: note = DNA
agtcgttggctgtgaatactt

SEQ ID NO: 951 - DNA, 21 bp, synthetic construct
  source 1..21: mol_type = other DNA; note = Description of Artificial Sequence: Synthetic oligonucleotide; note = Description of Combined DNA/RNA Molecule: Synthetic oligonucleotide
  modified_base 1: mod_base = OTHER; note = 2'-O-methyluridine-3'-phosphate
  modified_base 3: mod_base = OTHER; note = 2'-O-methyluridine-3'-phosphate
  modified_base 4: mod_base = OTHER; note = 2'-O-methyluridine-3'-phosphate
  modified_base 5: mod_base = OTHER; note = 2'-O-methylcytidine-3'-phosphate
  modified_base 7: mod_base = OTHER; note = 2'-O-methylcytidine-3'-phosphate
  modified_base 10: mod_base = OTHER; note = 2'-O-methylcytidine-3'-phosphate
  modified_base 11: mod_base = OTHER; note = 2'-O-methylcytidine-3'-phosphate
  modified_base 14: mod_base = OTHER; note = 2'-O-methylcytidine-3'-phosphate
  modified_base 17: mod_base = OTHER; note = 2'-O-methylcytidine-3'-phosphate
  modified_base 18: mod_base = OTHER; note = 2'-O-methyluridine-3'-phosphate
  modified_base 19: mod_base = OTHER; note = 2'-O-methylcytidine-3'-phosphate
  misc_feature 1..19: note = RNA
  misc_feature 20..21: note = DNA
tattcacagccaacgactctt

SEQ ID NO: 952 - DNA, 21 bp, synthetic construct
  source 1..21: mol_type = other DNA; note = Description of Artificial Sequence: Synthetic oligonucleotide; note = Description of Combined DNA/RNA Molecule: Synthetic oligonucleotide
  modified_base 18: mod_base = OTHER; note = 2'-O-methyluridine-3'-phosphate
  misc_feature 1..19: note = RNA
  misc_feature 20..21: note = DNA
gagtcgttggctgtgaatatt

SEQ ID NO: 953 - DNA, 21 bp, synthetic construct
  source 1..21: mol_type = other DNA; note = Description of Artificial Sequence: Synthetic oligonucleotide; note = Description of Combined DNA/RNA Molecule: Synthetic oligonucleotide
  modified_base 1: mod_base = OTHER; note = 2'-O-methyluridine-3'-phosphate
  modified_base 2: mod_base = OTHER; note = 2'-O-methylcytidine-3'-phosphate
  modified_base 4: mod_base = OTHER; note = 2'-O-methylcytidine-3'-phosphate
  modified_base 7: mod_base = OTHER; note = 2'-O-methylcytidine-3'-phosphate
  modified_base 8: mod_base = OTHER; note = 2'-O-methylcytidine-3'-phosphate
  modified_base 11: mod_base = OTHER; note = 2'-O-methylcytidine-3'-phosphate
  modified_base 14: mod_base = OTHER; note = 2'-O-methylcytidine-3'-phosphate
  modified_base 15: mod_base = OTHER; note = 2'-O-methyluridine-3'-phosphate
  modified_base 16: mod_base = OTHER; note = 2'-O-methylcytidine-3'-phosphate
  modified_base 17: mod_base = OTHER; note = 2'-O-methylcytidine-3'-phosphate
  misc_feature 1..19: note = RNA
  misc_feature 20..21: note = DNA
tcacagccaacgactccggtt

SEQ ID NO: 954 - DNA, 21 bp, synthetic construct
  source 1..21: mol_type = other DNA; note = Description of Artificial Sequence: Synthetic oligonucleotide; note = Description of Combined DNA/RNA Molecule: Synthetic oligonucleotide
  misc_feature 1..19: note = RNA
  misc_feature 20..21: note = DNA
ccggagtcgttggctgtgatt

SEQ ID NO: 955 - DNA, 21 bp, synthetic construct
  source 1..21: mol_type = other DNA; note = Description of Artificial Sequence: Synthetic oligonucleotide; note = Description of Combined DNA/RNA Molecule: Synthetic oligonucleotide
  modified_base 1: mod_base = OTHER; note = 2'-O-methylcytidine-3'-phosphate
  modified_base 2: mod_base = OTHER; note = 2'-O-methylcytidine-3'-phosphate
  modified_base 3: mod_base = OTHER; note = 2'-O-methylcytidine-3'-phosphate
  modified_base 4: mod_base = OTHER; note = 2'-O-methylcytidine-3'-phosphate
  modified_base 6: mod_base = OTHER; note = 2'-O-methylcytidine-3'-phosphate
  modified_base 7: mod_base = OTHER; note = 2'-O-methylcytidine-3'-phosphate
  modified_base 9: mod_base = OTHER; note = 2'-O-methylcytidine-3'-phosphate
  modified_base 10: mod_base = OTHER; note = 2'-O-methyluridine-3'-phosphate
  modified_base 12: mod_base = OTHER; note = 2'-O-methylcytidine-3'-phosphate
  modified_base 14: mod_base = OTHER; note = 2'-O-methylcytidine-3'-phosphate
  modified_base 15: mod_base = OTHER; note = 2'-O-methylcytidine-3'-phosphate
  modified_base 17: mod_base = OTHER; note = 2'-O-methyluridine-3'-phosphate
  modified_base 18: mod_base = OTHER; note = 2'-O-methyluridine-3'-phosphate
  misc_feature 1..19: note = RNA
  misc_feature 20..21: note = DNA
ccccgccgctacaccattgtt

SEQ ID NO: 956 - DNA, 21 bp, synthetic construct
  source 1..21: mol_type = other DNA; note = Description of Artificial Sequence: Synthetic oligonucleotide; note = Description of Combined DNA/RNA Molecule: Synthetic oligonucleotide
  modified_base 1: mod_base = OTHER; note = 2'-O-methylcytidine-3'-phosphate
  modified_base 9: mod_base = OTHER; note = 2'-O-methyluridine-3'-phosphate
  misc_feature 1..19: note = RNA
  misc_feature 20..21: note = DNA
caatggtgtagcggcggggtt

SEQ ID NO: 957 - DNA, 21 bp, synthetic construct
  source 1..21: mol_type = other DNA; note = Description of Artificial Sequence: Synthetic oligonucleotide; note = Description of Combined DNA/RNA Molecule: Synthetic oligonucleotide
  modified_base 5: mod_base = OTHER; note = 2'-O-methyluridine-3'-phosphate
  modified_base 6: mod_base = OTHER; note = 2'-O-methylcytidine-3'-phosphate
  modified_base 7: mod_base = OTHER; note = 2'-O-methylcytidine-3'-phosphate
  modified_base 9: mod_base = OTHER; note = 2'-O-methylcytidine-3'-phosphate
  modified_base 10: mod_base = OTHER; note = 2'-O-methyluridine-3'-phosphate
  modified_base 11: mod_base = OTHER; note = 2'-O-methylcytidine-3'-phosphate
  modified_base 13: mod_base = OTHER; note = 2'-O-methyluridine-3'-phosphate
  modified_base 14: mod_base = OTHER; note = 2'-O-methyluridine-3'-phosphate
  modified_base 15: mod_base = OTHER; note = 2'-O-methylcytidine-3'-phosphate
  modified_base 16: mod_base = OTHER; note = 2'-O-methyluridine-3'-phosphate
  modified_base 17: mod_base = OTHER; note = 2'-O-methyluridine-3'-phosphate
  misc_feature 1..19: note = RNA
  misc_feature 20..21: note = DNA
gaagtccactcattcttggtt

SEQ ID NO: 958 - DNA, 21 bp, synthetic construct
  source 1..21: mol_type = other DNA; note = Description of Artificial Sequence: Synthetic oligonucleotide; note = Description of Combined DNA/RNA Molecule: Synthetic oligonucleotide
  modified_base 2: mod_base = OTHER; note = 2'-O-methylcytidine-3'-phosphate
  misc_feature 1..19: note = RNA
  misc_feature 20..21: note = DNA
ccaagaatgagtggacttctt

SEQ ID NO: 959 - DNA, 21 bp, synthetic construct
  source 1..21: mol_type = other DNA; note = Description of Artificial Sequence: Synthetic oligonucleotide; note = Description of Combined DNA/RNA Molecule: Synthetic oligonucleotide
  modified_base 1: mod_base = OTHER; note = 2'-O-methylcytidine-3'-phosphate
  modified_base 2: mod_base = OTHER; note = 2'-O-methylcytidine-3'-phosphate
  modified_base 3: mod_base = OTHER; note = 2'-O-methylcytidine-3'-phosphate
  modified_base 4: mod_base = OTHER; note = 2'-O-methyluridine-3'-phosphate
  modified_base 6: mod_base = OTHER; note = 2'-O-methylcytidine-3'-phosphate
  modified_base 7: mod_base = OTHER; note = 2'-O-methyluridine-3'-phosphate
  modified_base 11: mod_base = OTHER; note = 2'-O-methylcytidine-3'-phosphate
  modified_base 12: mod_base = OTHER; note = 2'-O-methylcytidine-3'-phosphate
  modified_base 13: mod_base = OTHER; note = 2'-O-methylcytidine-3'-phosphate
  modified_base 14: mod_base = OTHER; note = 2'-O-methylcytidine-3'-phosphate
  modified_base 15: mod_base = OTHER; note = 2'-O-methyluridine-3'-phosphate
  modified_base 17: mod_base = OTHER; note = 2'-O-methylcytidine-3'-phosphate
  modified_base 18: mod_base = OTHER; note = 2'-O-methyluridine-3'-phosphate
  modified_base 19: mod_base = OTHER; note = 2'-O-methylcytidine-3'-phosphate
  misc_feature 1..19: note = RNA
  misc_feature 20..21: note = DNA
ccctgctgagcccctactctt

SEQ ID NO: 960 - DNA, 21 bp, synthetic construct
  source 1..21: mol_type = other DNA; note = Description of Artificial Sequence: Synthetic oligonucleotide; note = Description of Combined DNA/RNA Molecule: Synthetic oligonucleotide
  modified_base 4: mod_base = OTHER; note = 2'-O-methyluridine-3'-phosphate
  modified_base 12: mod_base = OTHER; note = 2'-O-methylcytidine-3'-phosphate
  modified_base 15: mod_base = OTHER; note = 2'-O-methylcytidine-3'-phosphate
  misc_feature 1..19: note = RNA
  misc_feature 20..21: note = DNA
gagtaggggctcagcagggtt

SEQ ID NO: 961 - DNA, 21 bp, synthetic construct
  source 1..21: mol_type = other DNA; note = Description of Artificial Sequence: Synthetic oligonucleotide; note = Description of Combined DNA/RNA Molecule: Synthetic oligonucleotide
  modified_base 1: mod_base = OTHER; note = 2'-O-methylcytidine-3'-phosphate
  modified_base 2: mod_base = OTHER; note = 2'-O-methyluridine-3'-phosphate
  modified_base 6: mod_base = OTHER; note = 2'-O-methylcytidine-3'-phosphate
  modified_base 7: mod_base = OTHER; note = 2'-O-methylcytidine-3'-phosphate
  modified_base 8: mod_base = OTHER; note = 2'-O-methylcytidine-3'-phosphate
  modified_base 9: mod_base = OTHER; note = 2'-O-methylcytidine-3'-phosphate
  modified_base 10: mod_base = OTHER; note = 2'-O-methyluridine-3'-phosphate
  modified_base 12: mod_base = OTHER; note = 2'-O-methylcytidine-3'-phosphate
  modified_base 13: mod_base = OTHER; note = 2'-O-methyluridine-3'-phosphate
  modified_base 14: mod_base = OTHER; note = 2'-O-methylcytidine-3'-phosphate
  modified_base 15: mod_base = OTHER; note = 2'-O-methylcytidine-3'-phosphate
  modified_base 16: mod_base = OTHER; note = 2'-O-methyluridine-3'-phosphate
  modified_base 18: mod_base = OTHER; note = 2'-O-methyluridine-3'-phosphate
  modified_base 19: mod_base = OTHER; note = 2'-O-methyluridine-3'-phosphate
  misc_feature 1..19: note = RNA
  misc_feature 20..21: note = DNA
ctgagcccctactcctatttt

SEQ ID NO: 962 - DNA, 21 bp, synthetic construct
  source 1..21: mol_type = other DNA; note = Description of Artificial Sequence: Synthetic oligonucleotide; note = Description of Combined DNA/RNA Molecule: Synthetic oligonucleotide
  modified_base 3: mod_base = OTHER; note = 2'-O-methyluridine-3'-phosphate
  modified_base 9: mod_base = OTHER; note = 2'-O-methyluridine-3'-phosphate
  modified_base 17: mod_base = OTHER; note = 2'-O-methylcytidine-3'-phosphate
  misc_feature 1..19: note = RNA
  misc_feature 20..21: note = DNA
aataggagtaggggctcagtt

SEQ ID NO: 963 - DNA, 21 bp, synthetic construct
  source 1..21: mol_type = other DNA; note = Description of Artificial Sequence: Synthetic oligonucleotide; note = Description of Combined DNA/RNA Molecule: Synthetic oligonucleotide
  modified_base 1: mod_base = OTHER; note = 2'-O-methyluridine-3'-phosphate
  modified_base 5: mod_base = OTHER; note = 2'-O-methylcytidine-3'-phosphate
  modified_base 6: mod_base = OTHER; note = 2'-O-methylcytidine-3'-phosphate
  modified_base 7: mod_base = OTHER; note = 2'-O-methylcytidine-3'-phosphate
  modified_base 8: mod_base = OTHER; note = 2'-O-methylcytidine-3'-phosphate
  modified_base 9: mod_base = OTHER; note = 2'-O-methyluridine-3'-phosphate
  modified_base 11: mod_base = OTHER; note = 2'-O-methylcytidine-3'-phosphate
  modified_base 12: mod_base = OTHER; note = 2'-O-methyluridine-3'-phosphate
  modified_base 13: mod_base = OTHER; note = 2'-O-methylcytidine-3'-phosphate
  modified_base 14: mod_base = OTHER; note = 2'-O-methylcytidine-3'-phosphate
  modified_base 15: mod_base = OTHER; note = 2'-O-methyluridine-3'-phosphate
  modified_base 17: mod_base = OTHER; note = 2'-O-methyluridine-3'-phosphate
  modified_base 18: mod_base = OTHER; note = 2'-O-methyluridine-3'-phosphate
  modified_base 19: mod_base = OTHER; note = 2'-O-methylcytidine-3'-phosphate
  misc_feature 1..19: note = RNA
  misc_feature 20..21: note = DNA
tgagcccctactcctattctt

SEQ ID NO: 964 - DNA, 21 bp, synthetic construct
  source 1..21: mol_type = other DNA; note = Description of Artificial Sequence: Synthetic oligonucleotide; note = Description of Combined DNA/RNA Molecule: Synthetic oligonucleotide
  modified_base 4: mod_base = OTHER; note = 2'-O-methyluridine-3'-phosphate
  modified_base 10: mod_base = OTHER; note = 2'-O-methyluridine-3'-phosphate
  modified_base 18: mod_base = OTHER; note = 2'-O-methylcytidine-3'-phosphate
  misc_feature 1..19: note = RNA
  misc_feature 20..21: note = DNA
gaataggagtaggggctcatt

SEQ ID NO: 965 - DNA, 21 bp, synthetic construct
  source 1..21: mol_type = other DNA; note = Description of Artificial Sequence: Synthetic oligonucleotide; note = Description of Combined DNA/RNA Molecule: Synthetic oligonucleotide
  modified_base 1: mod_base = OTHER; note = 2'-O-methylcytidine-3'-phosphate
  modified_base 2: mod_base = OTHER; note = 2'-O-methylcytidine-3'-phosphate
  modified_base 3: mod_base = OTHER; note = 2'-O-methylcytidine-3'-phosphate
  modified_base 4: mod_base = OTHER; note = 2'-O-methylcytidine-3'-phosphate
  modified_base 5: mod_base = OTHER; note = 2'-O-methyluridine-3'-phosphate
  modified_base 7: mod_base = OTHER; note = 2'-O-methylcytidine-3'-phosphate
  modified_base 8: mod_base = OTHER; note = 2'-O-methyluridine-3'-phosphate
  modified_base 9: mod_base = OTHER; note = 2'-O-methylcytidine-3'-phosphate
  modified_base 10: mod_base = OTHER; note = 2'-O-methylcytidine-3'-phosphate
  modified_base 11: mod_base = OTHER; note = 2'-O-methyluridine-3'-phosphate
  modified_base 13: mod_base = OTHER; note = 2'-O-methyluridine-3'-phosphate
  modified_base 14: mod_base = OTHER; note = 2'-O-methyluridine-3'-phosphate
  modified_base 15: mod_base = OTHER; note = 2'-O-methylcytidine-3'-phosphate
  modified_base 16: mod_base = OTHER; note = 2'-O-methylcytidine-3'-phosphate
  modified_base 18: mod_base = OTHER; note = 2'-O-methylcytidine-3'-phosphate
  modified_base 19: mod_base = OTHER; note = 2'-O-methylcytidine-3'-phosphate
  misc_feature 1..19: note = RNA
  misc_feature 20..21: note = DNA
cccctactcctattccacctt

SEQ ID NO: 966 - DNA, 21 bp, synthetic construct
  source 1..21: mol_type = other DNA; note = Description of Artificial Sequence: Synthetic oligonucleotide; note = Description of Combined DNA/RNA Molecule: Synthetic oligonucleotide
  modified_base 8: mod_base = OTHER; note = 2'-O-methyluridine-3'-phosphate
  modified_base 14: mod_base = OTHER; note = 2'-O-methyluridine-3'-phosphate
  misc_feature 1..19: note = RNA
  misc_feature 20..21: note = DNA
ggtggaataggagtaggggtt

SEQ ID NO: 967 - DNA, 21 bp, synthetic construct
  source 1..21: mol_type = other DNA; note = Description of Artificial Sequence: Synthetic oligonucleotide; note = Description of Combined DNA/RNA Molecule: Synthetic oligonucleotide
  modified_base 1: mod_base = OTHER; note = 2'-O-methylcytidine-3'-phosphate
  modified_base 2: mod_base = OTHER; note = 2'-O-methyluridine-3'-phosphate
  modified_base 4: mod_base = OTHER; note = 2'-O-methylcytidine-3'-phosphate
  modified_base 5: mod_base = OTHER; note = 2'-O-methyluridine-3'-phosphate
  modified_base 6: mod_base = OTHER; note = 2'-O-methylcytidine-3'-phosphate
  modified_base 7: mod_base = OTHER; note = 2'-O-methylcytidine-3'-phosphate
  modified_base 8: mod_base = OTHER; note = 2'-O-methyluridine-3'-phosphate
  modified_base 10: mod_base = OTHER; note = 2'-O-methyluridine-3'-phosphate
  modified_base 11: mod_base = OTHER; note = 2'-O-methyluridine-3'-phosphate
  modified_base 12: mod_base = OTHER; note = 2'-O-methylcytidine-3'-phosphate
  modified_base 13: mod_base = OTHER; note = 2'-O-methylcytidine-3'-phosphate
  modified_base 15: mod_base = OTHER; note = 2'-O-methylcytidine-3'-phosphate
  modified_base 16: mod_base = OTHER; note = 2'-O-methylcytidine-3'-phosphate
  modified_base 18: mod_base = OTHER; note = 2'-O-methylcytidine-3'-phosphate
  misc_feature 1..19: note = RNA
  misc_feature 20..21: note = DNA
ctactcctattccaccacgtt

SEQ ID NO: 968 - DNA, 21 bp, synthetic construct
  source 1..21: mol_type = other DNA; note = Description of Artificial Sequence: Synthetic oligonucleotide; note = Description of Combined DNA/RNA Molecule: Synthetic oligonucleotide
  modified_base 11: mod_base = OTHER; note = 2'-O-methyluridine-3'-phosphate
  modified_base 17: mod_base = OTHER; note = 2'-O-methyluridine-3'-phosphate
  misc_feature 1..19: note = RNA
  misc_feature 20..21: note = DNA
cgtggtggaataggagtagtt

SEQ ID NO: 969 - DNA, 21 bp, synthetic construct
  source 1..21: mol_type = other DNA; note = Description of Artificial Sequence: Synthetic oligonucleotide; note = Description of Combined DNA/RNA Molecule: Synthetic oligonucleotide
  modified_base 1: mod_base = OTHER; note = 2'-O-methyluridine-3'-phosphate
  modified_base 3: mod_base = OTHER; note = 2'-O-methylcytidine-3'-phosphate
  modified_base 4: mod_base = OTHER; note = 2'-O-methyluridine-3'-phosphate
  modified_base 5: mod_base = OTHER; note = 2'-O-methylcytidine-3'-phosphate
  modified_base 6: mod_base = OTHER; note = 2'-O-methylcytidine-3'-phosphate
  modified_base 7: mod_base = OTHER; note = 2'-O-methyluridine-3'-phosphate
  modified_base 9: mod_base = OTHER; note = 2'-O-methyluridine-3'-phosphate
  modified_base 10: mod_base = OTHER; note = 2'-O-methyluridine-3'-phosphate
  modified_base 11: mod_base = OTHER; note = 2'-O-methylcytidine-3'-phosphate
  modified_base 12: mod_base = OTHER; note = 2'-O-methylcytidine-3'-phosphate
  modified_base 14: mod_base = OTHER; note = 2'-O-methylcytidine-3'-phosphate
  modified_base 15: mod_base = OTHER; note = 2'-O-methylcytidine-3'-phosphate
  modified_base 17: mod_base = OTHER; note = 2'-O-methylcytidine-3'-phosphate
  misc_feature 1..19: note = RNA
  misc_feature 20..21: note = DNA
tactcctattccaccacggtt

SEQ ID NO: 970 - DNA, 21 bp, synthetic construct
  source 1..21: mol_type = other DNA; note = Description of Artificial Sequence: Synthetic oligonucleotide; note = Description of Combined DNA/RNA Molecule: Synthetic oligonucleotide
  modified_base 12: mod_base = OTHER; note = 2'-O-methyluridine-3'-phosphate
  modified_base 18: mod_base = OTHER; note = 2'-O-methyluridine-3'-phosphate
  misc_feature 1..19: note = RNA
  misc_feature 20..21: note = DNA
ccgtggtggaataggagtatt

SEQ ID NO: 971 - DNA, 21 bp, synthetic construct
  source 1..21: mol_type = other DNA; note = Description of Artificial Sequence: Synthetic oligonucleotide; note = Description of Combined DNA/RNA Molecule: Synthetic oligonucleotide
  modified_base 2: mod_base = OTHER; note = 2'-O-methylcytidine-3'-phosphate
  modified_base 3: mod_base = OTHER; note = 2'-O-methyluridine-3'-phosphate
  modified_base 4: mod_base = OTHER; note = 2'-O-methylcytidine-3'-phosphate
  modified_base 5: mod_base = OTHER; note = 2'-O-methylcytidine-3'-phosphate
  modified_base 6: mod_base = OTHER; note = 2'-O-methyluridine-3'-phosphate
  modified_base 8: mod_base = OTHER; note = 2'-O-methyluridine-3'-phosphate
  modified_base 9: mod_base = OTHER; note = 2'-O-methyluridine-3'-phosphate
  modified_base 10: mod_base = OTHER; note = 2'-O-methylcytidine-3'-phosphate
  modified_base 11: mod_base = OTHER; note = 2'-O-methylcytidine-3'-phosphate
  modified_base 13: mod_base = OTHER; note = 2'-O-methylcytidine-3'-phosphate
  modified_base 14: mod_base = OTHER; note = 2'-O-methylcytidine-3'-phosphate
  modified_base 16: mod_base = OTHER; note = 2'-O-methylcytidine-3'-phosphate
  modified_base 19: mod_base = OTHER; note = 2'-O-methylcytidine-3'-phosphate
  misc_feature 1..19: note = RNA
  misc_feature 20..21: note = DNA
actcctattccaccacggctt

SEQ ID NO: 972 - DNA, 21 bp, synthetic construct
  source 1..21: mol_type = other DNA; note = Description of Artificial Sequence: Synthetic oligonucleotide; note = Description of Combined DNA/RNA Molecule: Synthetic oligonucleotide
  modified_base 13: mod_base = OTHER; note = 2'-O-methyluridine-3'-phosphate
  misc_feature 1..19: note = RNA
  misc_feature 20..21: note = DNA
gccgtggtggaataggagttt

SEQ ID NO: 973 - DNA, 21 bp, synthetic construct
  source 1..21: mol_type = other DNA; note = Description of Artificial Sequence: Synthetic oligonucleotide; note = Description of Combined DNA/RNA Molecule: Synthetic oligonucleotide
  modified_base 1: mod_base = OTHER; note = 2'-O-methyluridine-3'-phosphate
  modified_base 2: mod_base = OTHER; note = 2'-O-methylcytidine-3'-phosphate
  modified_base 3: mod_base = OTHER; note = 2'-O-methylcytidine-3'-phosphate
  modified_base 4: mod_base = OTHER; note = 2'-O-methyluridine-3'-phosphate
  modified_base 6: mod_base = OTHER; note = 2'-O-methyluridine-3'-phosphate
  modified_base 7: mod_base = OTHER; note = 2'-O-methyluridine-3'-phosphate
  modified_base 8: mod_base = OTHER; note = 2'-O-methylcytidine-3'-phosphate
  modified_base 9: mod_base = OTHER; note = 2'-O-methylcytidine-3'-phosphate
  modified_base 11: mod_base = OTHER; note = 2'-O-methylcytidine-3'-phosphate
  modified_base 12: mod_base = OTHER; note = 2'-O-methylcytidine-3'-phosphate
  modified_base 14: mod_base = OTHER; note = 2'-O-methylcytidine-3'-phosphate
  modified_base 17: mod_base = OTHER; note = 2'-O-methylcytidine-3'-phosphate
  modified_base 18: mod_base = OTHER; note = 2'-O-methyluridine-3'-phosphate
  misc_feature 1..19: note = RNA
  misc_feature 20..21: note = DNA
tcctattccaccacggctgtt

SEQ ID NO: 974 - DNA, 21 bp, synthetic construct
  source 1..21: mol_type = other DNA; note = Description of Artificial Sequence: Synthetic oligonucleotide; note = Description of Combined DNA/RNA Molecule: Synthetic oligonucleotide
  modified_base 1: mod_base = OTHER; note = 2'-O-methylcytidine-3'-phosphate
  modified_base 15: mod_base = OTHER; note = 2'-O-methyluridine-3'-phosphate
  misc_feature 1..19: note = RNA
  misc_feature 20..21: note = DNA
cagccgtggtggaataggatt

SEQ ID NO: 975 - DNA, 21 bp, synthetic construct
  source 1..21: mol_type = other DNA; note = Description of Artificial Sequence: Synthetic oligonucleotide; note = Description of Combined DNA/RNA Molecule: Synthetic oligonucleotide
  modified_base 1: mod_base = OTHER; note = 2'-O-methyluridine-3'-phosphate
  modified_base 3: mod_base = OTHER; note = 2'-O-methyluridine-3'-phosphate
  modified_base 4: mod_base = OTHER; note = 2'-O-methyluridine-3'-phosphate
  modified_base 5: mod_base = OTHER; note = 2'-O-methylcytidine-3'-phosphate
  modified_base 6: mod_base = OTHER; note = 2'-O-methylcytidine-3'-phosphate
  modified_base 8: mod_base = OTHER; note = 2'-O-methylcytidine-3'-phosphate
  modified_base 9: mod_base = OTHER; note = 2'-O-methylcytidine-3'-phosphate
  modified_base 11: mod_base = OTHER; note = 2'-O-methylcytidine-3'-phosphate
  modified_base 14: mod_base = OTHER; note = 2'-O-methylcytidine-3'-phosphate
  modified_base 15: mod_base = OTHER; note = 2'-O-methyluridine-3'-phosphate
  modified_base 17: mod_base = OTHER; note = 2'-O-methyluridine-3'-phosphate
  modified_base 18: mod_base = OTHER; note = 2'-O-methylcytidine-3'-phosphate
  misc_feature 1..19: note = RNA
  misc_feature 20..21: note = DNA
tattccaccacggctgtcgtt

SEQ ID NO: 976 - DNA, 21 bp, synthetic construct
  source 1..21: mol_type = other DNA; note = Description of Artificial Sequence: Synthetic oligonucleotide; note = Description of Combined DNA/RNA Molecule: Synthetic oligonucleotide
  modified_base 4: mod_base = OTHER; note = 2'-O-methylcytidine-3'-phosphate
  modified_base 18: mod_base = OTHER; note = 2'-O-methyluridine-3'-phosphate
  misc_feature 1..19: note = RNA
  misc_feature 20..21: note = DNA
cgacagccgtggtggaatatt

SEQ ID NO: 977 - DNA, 21 bp, synthetic construct
  source 1..21: mol_type = other DNA; note = Description of Artificial Sequence: Synthetic oligonucleotide; note = Description of Combined DNA/RNA Molecule: Synthetic oligonucleotide
  modified_base 2: mod_base = OTHER; note = 2'-O-methyluridine-3'-phosphate
  modified_base 3: mod_base = OTHER; note = 2'-O-methyluridine-3'-phosphate
  modified_base 4: mod_base = OTHER; note = 2'-O-methylcytidine-3'-phosphate
  modified_base 5: mod_base = OTHER; note = 2'-O-methylcytidine-3'-phosphate
  modified_base 7: mod_base = OTHER; note = 2'-O-methylcytidine-3'-phosphate
  modified_base 8: mod_base = OTHER; note = 2'-O-methylcytidine-3'-phosphate
  modified_base 10: mod_base = OTHER; note = 2'-O-methylcytidine-3'-phosphate
  modified_base 13: mod_base = OTHER; note = 2'-O-methylcytidine-3'-phosphate
  modified_base 14: mod_base = OTHER; note = 2'-O-methyluridine-3'-phosphate
  modified_base 16: mod_base = OTHER; note = 2'-O-methyluridine-3'-phosphate
  modified_base 17: mod_base = OTHER; note = 2'-O-methylcytidine-3'-phosphate
  modified_base 19: mod_base = OTHER; note = 2'-O-methyluridine-3'-phosphate
  misc_feature 1..19: note = RNA
  misc_feature 20..21: note = DNA
attccaccacggctgtcgttt

SEQ ID NO: 978 - DNA, 21 bp, synthetic construct
  source 1..21: mol_type = other DNA; note = Description of Artificial Sequence: Synthetic oligonucleotide; note = Description of Combined DNA/RNA Molecule: Synthetic oligonucleotide
  modified_base 5: mod_base = OTHER; note = 2'-O-methylcytidine-3'-phosphate
  misc_feature 1..19: note = RNA
  misc_feature 20..21: note = DNA
acgacagccgtggtggaattt

SEQ ID NO: 979 - DNA, 21 bp, synthetic construct
  source 1..21: mol_type = other DNA; note = Description of Artificial Sequence: Synthetic oligonucleotide; note = Description of Combined DNA/RNA Molecule: Synthetic oligonucleotide
  modified_base 1: mod_base = OTHER; note = 2'-O-methylcytidine-3'-phosphate
  modified_base 3: mod_base = OTHER; note = 2'-O-methylcytidine-3'-phosphate
  modified_base 4: mod_base = OTHER; note = 2'-O-methylcytidine-3'-phosphate
  modified_base 6: mod_base = OTHER; note = 2'-O-methylcytidine-3'-phosphate
  modified_base 9: mod_base = OTHER; note = 2'-O-methylcytidine-3'-phosphate
  modified_base 10: mod_base = OTHER; note = 2'-O-methyluridine-3'-phosphate
  modified_base 12: mod_base = OTHER; note = 2'-O-methyluridine-3'-phosphate
  modified_base 13: mod_base = OTHER; note = 2'-O-methylcytidine-3'-phosphate
  modified_base 15: mod_base = OTHER; note = 2'-O-methyluridine-3'-phosphate
  modified_base 16: mod_base = OTHER; note = 2'-O-methylcytidine-3'-phosphate
  modified_base 18: mod_base = OTHER; note = 2'-O-methylcytidine-3'-phosphate
  modified_base 19: mod_base = OTHER; note = 2'-O-methylcytidine-3'-phosphate
  misc_feature 1..19: note = RNA
  misc_feature 20..21: note = DNA
caccacggctgtcgtcacctt

SEQ ID NO: 980 - DNA, 21 bp, synthetic construct
  source 1..21: mol_type = other DNA; note = Description of Artificial Sequence: Synthetic oligonucleotide; note = Description of Combined DNA/RNA Molecule: Synthetic oligonucleotide
  modified_base 9: mod_base = OTHER; note = 2'-O-methylcytidine-3'-phosphate
  misc_feature 1..19: note = RNA
  misc_feature 20..21: note = DNA
ggtgacgacagccgtggtgtt

SEQ ID NO: 981 - DNA, 21 bp, synthetic construct
  source 1..21: mol_type = other DNA; note = Description of Artificial Sequence: Synthetic oligonucleotide; note = Description of Combined DNA/RNA Molecule: Synthetic oligonucleotide
  modified_base 2: mod_base = OTHER; note = 2'-O-methylcytidine-3'-phosphate
  modified_base 3: mod_base = OTHER; note = 2'-O-methylcytidine-3'-phosphate
  modified_base 5: mod_base = OTHER; note = 2'-O-methylcytidine-3'-phosphate
  modified_base 8: mod_base = OTHER; note = 2'-O-methylcytidine-3'-phosphate
  modified_base 9: mod_base = OTHER; note = 2'-O-methyluridine-3'-phosphate
  modified_base 11: mod_base = OTHER; note = 2'-O-methyluridine-3'-phosphate
  modified_base 12: mod_base = OTHER; note = 2'-O-methylcytidine-3'-phosphate
  modified_base 14: mod_base = OTHER; note = 2'-O-methyluridine-3'-phosphate
  modified_base 15: mod_base = OTHER; note = 2'-O-methylcytidine-3'-phosphate
  modified_base 17: mod_base = OTHER; note = 2'-O-methylcytidine-3'-phosphate
  modified_base 18: mod_base = OTHER; note = 2'-O-methylcytidine-3'-phosphate
  misc_feature 1..19: note = RNA
  misc_feature 20..21: note = DNA
accacggctgtcgtcaccatt

SEQ ID NO: 982 - DNA, 21 bp, synthetic construct
  source 1..21: mol_type = other DNA; note = Description of Artificial Sequence: Synthetic oligonucleotide; note = Description of Combined DNA/RNA Molecule: Synthetic oligonucleotide
  modified_base 10: mod_base = OTHER; note = 2'-O-methylcytidine-3'-phosphate
  misc_feature 1..19: note = RNA
  misc_feature 20..21: note = DNA
tggtgacgacagccgtggttt

SEQ ID NO: 983 - DNA, 21 bp, synthetic construct
  source 1..21: mol_type = other DNA; note = Description of Artificial Sequence: Synthetic oligonucleotide; note = Description of Combined DNA/RNA Molecule: Synthetic oligonucleotide
  modified_base 1: mod_base = OTHER; note = 2'-O-methylcytidine-3'-phosphate
  modified_base 2: mod_base = OTHER; note = 2'-O-methylcytidine-3'-phosphate
  modified_base 4: mod_base = OTHER; note = 2'-O-methylcytidine-3'-phosphate
  modified_base 7: mod_base = OTHER; note = 2'-O-methylcytidine-3'-phosphate
  modified_base 8: mod_base = OTHER; note = 2'-O-methyluridine-3'-phosphate
  modified_base 10: mod_base = OTHER; note = 2'-O-methyluridine-3'-phosphate
  modified_base 11: mod_base = OTHER; note = 2'-O-methylcytidine-3'-phosphate
  modified_base 13: mod_base = OTHER; note = 2'-O-methyluridine-3'-phosphate
  modified_base 14: mod_base = OTHER; note = 2'-O-methylcytidine-3'-phosphate
  modified_base 16: mod_base = OTHER; note = 2'-O-methylcytidine-3'-phosphate
  modified_base 17: mod_base = OTHER; note = 2'-O-methylcytidine-3'-phosphate
  misc_feature 1..19: note = RNA
  misc_feature 20..21: note = DNA
ccacggctgtcgtcaccaatt

SEQ ID NO: 984 - DNA, 21 bp, synthetic construct
  source 1..21: mol_type = other DNA; note = Description of Artificial Sequence: Synthetic oligonucleotide; note = Description of Combined DNA/RNA Molecule: Synthetic oligonucleotide
  modified_base 11: mod_base = OTHER; note = 2'-O-methylcytidine-3'-phosphate
  misc_feature 1..19: note = RNA
  misc_feature 20..21: note = DNA
ttggtgacgacagccgtggtt

SEQ ID NO: 985 - DNA, 21 bp, synthetic construct
  source 1..21: mol_type = other DNA; note = Description of Artificial Sequence: Synthetic oligonucleotide; note = Description of Combined DNA/RNA Molecule: Synthetic oligonucleotide
  modified_base 2: mod_base = OTHER; note = 2'-O-methylcytidine-3'-phosphate
  modified_base 5: mod_base = OTHER; note = 2'-O-methylcytidine-3'-phosphate
  modified_base 6: mod_base = OTHER; note = 2'-O-methyluridine-3'-phosphate
  modified_base 8: mod_base = OTHER; note = 2'-O-methyluridine-3'-phosphate
  modified_base 9: mod_base = OTHER; note = 2'-O-methylcytidine-3'-phosphate
  modified_base 11: mod_base = OTHER; note = 2'-O-methyluridine-3'-phosphate
  modified_base 12: mod_base = OTHER; note = 2'-O-methylcytidine-3'-phosphate
  modified_base 14: mod_base = OTHER; note = 2'-O-methylcytidine-3'-phosphate
  modified_base 15: mod_base = OTHER; note = 2'-O-methylcytidine-3'-phosphate
  modified_base 18: mod_base = OTHER; note = 2'-O-methyluridine-3'-phosphate
  modified_base 19: mod_base = OTHER; note = 2'-O-methylcytidine-3'-phosphate
  misc_feature 1..19: note = RNA
  misc_feature 20..21: note = DNA
acggctgtcgtcaccaatctt

SEQ ID NO: 986 - DNA, 21 bp, synthetic construct
  source 1..21: mol_type = other DNA; note = Description of Artificial Sequence: Synthetic oligonucleotide; note = Description of Combined DNA/RNA Molecule: Synthetic oligonucleotide
  modified_base 13: mod_base = OTHER; note = 2'-O-methylcytidine-3'-phosphate
  misc_feature 1..19: note = RNA
  misc_feature 20..21: note = DNA
gattggtgacgacagccgttt

SEQ ID NO: 987 - DNA, 21 bp, synthetic construct
  source 1..21: mol_type = other DNA; note = Description of Artificial Sequence: Synthetic oligonucleotide; note = Description of Combined DNA/RNA Molecule: Synthetic oligonucleotide
  modified_base 1: mod_base = OTHER; note = 2'-O-methylcytidine-3'-phosphate
  modified_base 4: mod_base = OTHER; note = 2'-O-methylcytidine-3'-phosphate
  modified_base 5: mod_base = OTHER; note = 2'-O-methyluridine-3'-phosphate
  modified_base 7: mod_base = OTHER; note = 2'-O-methyluridine-3'-phosphate
  modified_base 8: mod_base = OTHER; note = 2'-O-methylcytidine-3'-phosphate
  modified_base 10: mod_base = OTHER; note = 2'-O-methyluridine-3'-phosphate
  modified_base 11: mod_base = OTHER; note = 2'-O-methylcytidine-3'-phosphate
  modified_base 13: mod_base = OTHER; note = 2'-O-methylcytidine-3'-phosphate
  modified_base 14: mod_base = OTHER; note = 2'-O-methylcytidine-3'-phosphate
  modified_base 17: mod_base = OTHER; note = 2'-O-methyluridine-3'-phosphate
  modified_base 18: mod_base = OTHER; note = 2'-O-methylcytidine-3'-phosphate
  modified_base 19: mod_base = OTHER; note = 2'-O-methylcytidine-3'-phosphate
  misc_feature 1..19: note = RNA
  misc_feature 20..21: note = DNA
cggctgtcgtcaccaatcctt

SEQ ID NO: 988 - DNA, 21 bp, synthetic construct
  source 1..21: mol_type = other DNA; note = Description of Artificial Sequence: Synthetic oligonucleotide; note = Description of Combined DNA/RNA Molecule: Synthetic oligonucleotide
  modified_base 14: mod_base = OTHER; note = 2'-O-methylcytidine-3'-phosphate
  misc_feature 1..19: note = RNA
  misc_feature 20..21: note = DNA
ggattggtgacgacagccgtt

SEQ ID NO: 989 - DNA, 21 bp, synthetic construct
  source 1..21: mol_type = other DNA; note = Description of Artificial Sequence: Synthetic oligonucleotide; note = Description of Combined DNA/RNA Molecule: Synthetic oligonucleotide
  modified_base 1: mod_base = OTHER; note = 2'-O-methylcytidine-3'-phosphate
  modified_base 3: mod_base = OTHER; note = 2'-O-methyluridine-3'-phosphate
  modified_base 4: mod_base = OTHER; note = 2'-O-methylcytidine-3'-phosphate
  modified_base 6: mod_base = OTHER; note = 2'-O-methylcytidine-3'-phosphate
  modified_base 7: mod_base = OTHER; note = 2'-O-methylcytidine-3'-phosphate
  modified_base 10: mod_base = OTHER; note = 2'-O-methyluridine-3'-phosphate
  modified_base 11: mod_base = OTHER; note = 2'-O-methylcytidine-3'-phosphate
  modified_base 12: mod_base = OTHER; note = 2'-O-methylcytidine-3'-phosphate
  modified_base 13: mod_base = OTHER; note = 2'-O-methylcytidine-3'-phosphate
  misc_feature 1..19: note = RNA
  misc_feature 20..21: note = DNA
cgtcaccaatcccaaggaatt

SEQ ID NO: 990 - DNA, 21 bp, synthetic construct
  source 1..21: mol_type = other DNA; note = Description of Artificial Sequence: Synthetic oligonucleotide; note = Description of Combined DNA/RNA Molecule: Synthetic oligonucleotide
  misc_feature 1..19: note = RNA
  misc_feature 20..21: note = DNA
ttccttgggattggtgacgtt

SEQ ID NO: 991 - DNA, 21 bp, synthetic construct
  source 1..21: mol_type = other DNA; note = Description of Artificial Sequence: Synthetic oligonucleotide; note = Description of Combined DNA/RNA Molecule: Synthetic oligonucleotide
  modified_base 1: mod_base = OTHER; note = 2'-O-methylcytidine-3'-phosphate
  modified_base 4: mod_base = OTHER; note = 2'-O-methyluridine-3'-phosphate
  modified_base 5: mod_base = OTHER; note = 2'-O-methylcytidine-3'-phosphate
  modified_base 6: mod_base = OTHER; note = 2'-O-methylcytidine-3'-phosphate
  modified_base 7: mod_base = OTHER; note = 2'-O-methylcytidine-3'-phosphate
  modified_base 14: mod_base = OTHER; note = 2'-O-methyluridine-3'-phosphate
  misc_feature 1..19: note = RNA
  misc_feature 20..21: note = DNA
caatcccaaggaatgagggtt

SEQ ID NO: 992 - DNA, 21 bp, synthetic construct
  source 1..21: mol_type = other DNA; note = Description of Artificial Sequence: Synthetic oligonucleotide; note = Description of Combined DNA/RNA Molecule: Synthetic oligonucleotide
  modified_base 5: mod_base = OTHER; note = 2'-O-methylcytidine-3'-phosphate
  misc_feature 1..19: note = RNA
  misc_feature 20..21: note = DNA
ccctcattccttgggattgtt

SEQ ID NO: 993 - DNA, 21 bp, synthetic construct
  source 1..21: mol_type = other DNA; note = Description of Artificial Sequence: Synthetic oligonucleotide; note = Description of Combined DNA/RNA Molecule: Synthetic oligonucleotide
  modified_base 1: mod_base = OTHER; note = 2'-O-methylcytidine-3'-phosphate
  modified_base 2: mod_base = OTHER; note = 2'-O-methylcytidine-3'-phosphate
  modified_base 3: mod_base = OTHER; note = 2'-O-methyluridine-3'-phosphate
  modified_base 10: mod_base = OTHER; note = 2'-O-methylcytidine-3'-phosphate
  modified_base 17: mod_base = OTHER; note = 2'-O-methyluridine-3'-phosphate
  misc_feature 1..19: note = RNA
  misc_feature 20..21: note = DNA
cctgaaggacgagggatggtt

SEQ ID NO: 994 - DNA, 21 bp, synthetic construct
  source 1..21: mol_type = other DNA; note = Description of Artificial Sequence: Synthetic oligonucleotide; note = Description of Combined DNA/RNA Molecule: Synthetic oligonucleotide
  modified_base 2: mod_base = OTHER; note = 2'-O-methylcytidine-3'-phosphate
  modified_base 16: mod_base = OTHER; note = 2'-O-methylcytidine-3'-phosphate
  misc_feature 1..19: note = RNA
  misc_feature 20..21: note = DNA
ccatccctcgtccttcaggtt

SEQ ID NO: 995 - DNA, 21 bp, synthetic construct
  source 1..21: mol_type = other DNA; note = Description of Artificial Sequence: Synthetic oligonucleotide; note = Description of Combined DNA/RNA Molecule: Synthetic oligonucleotide
  modified_base 4: mod_base = OTHER; note = 2'-O-methylcytidine-3'-phosphate
  modified_base 11: mod_base = OTHER; note = 2'-O-methyluridine-3'-phosphate
  modified_base 16: mod_base = OTHER; note = 2'-O-methyluridine-3'-phosphate
  modified_base 17: mod_base = OTHER; note = 2'-O-methyluridine-3'-phosphate
  modified_base 18: mod_base = OTHER; note = 2'-O-methyluridine-3'-phosphate
  modified_base 19: mod_base = OTHER; note = 2'-O-methylcytidine-3'-phosphate
  misc_feature 1..19: note = RNA
  misc_feature 20..21: note = DNA
ggacgagggatgggatttctt

SEQ ID NO: 996 - DNA, 21 bp, synthetic construct
  source 1..21: mol_type = other DNA; note = Description of Artificial Sequence: Synthetic oligonucleotide; note = Description of Combined DNA/RNA Molecule: Synthetic oligonucleotide
  modified_base 8: mod_base = OTHER; note = 2'-O-methylcytidine-3'-phosphate
  misc_feature 1..19: note = RNA
  misc_feature 20..21: note = DNA
gaaatcccatccctcgtcctt

SEQ ID NO: 997 - DNA, 21 bp, synthetic construct
  source 1..21: mol_type = other DNA; note = Description of Artificial Sequence: Synthetic oligonucleotide; note = Description of Combined DNA/RNA Molecule: Synthetic oligonucleotide
  modified_base 4: mod_base = OTHER; note = 2'-O-methyluridine-3'-phosphate
  modified_base 5: mod_base = OTHER; note = 2'-O-methylcytidine-3'-phosphate
  modified_base 6: mod_base = OTHER; note = 2'-O-methylcytidine-3'-phosphate
  modified_base 8: mod_base = OTHER; note = 2'-O-methylcytidine-3'-phosphate
  modified_base 9: mod_base = OTHER; note = 2'-O-methyluridine-3'-phosphate
  modified_base 10: mod_base = OTHER; note = 2'-O-methylcytidine-3'-phosphate
  modified_base 12: mod_base = OTHER; note = 2'-O-methyluridine-3'-phosphate
  modified_base 13: mod_base = OTHER; note = 2'-O-methyluridine-3'-phosphate
  modified_base 14: mod_base = OTHER; note = 2'-O-methylcytidine-3'-phosphate
  modified_base 15: mod_base = OTHER; note = 2'-O-methyluridine-3'-phosphate
  modified_base 16: mod_base = OTHER; note = 2'-O-methyluridine-3'-phosphate
  modified_base 19: mod_base = OTHER; note = 2'-O-methylcytidine-3'-phosphate
  misc_feature 1..19: note = RNA
  misc_feature 20..21: note = DNA
aagtccactcattcttggctt

SEQ ID NO: 998 - DNA, 21 bp, synthetic construct
  source 1..21: mol_type = other DNA; note = Description of Artificial Sequence: Synthetic oligonucleotide; note = Description of Combined DNA/RNA Molecule: Synthetic oligonucleotide
  modified_base 3: mod_base = OTHER; note = 2'-O-methylcytidine-3'-phosphate
  misc_feature 1..19: note = RNA
  misc_feature 20..21: note = DNA
gccaagaatgagtggactttt

SEQ ID NO: 999 - DNA, 21 bp, synthetic construct
  source 1..21: mol_type = other DNA; note = Description of Artificial Sequence: Synthetic oligonucleotide; note = Description of Combined DNA/RNA Molecule: Synthetic oligonucleotide
  modified_base 5: mod_base = OTHER; note = 2'-O-methyluridine-3'-phosphate
  modified_base 6: mod_base = OTHER; note = 2'-O-methyluridine-3'-phosphate
  modified_base 7: mod_base = OTHER; note = 2'-O-methyluridine-3'-phosphate
  modified_base 8: mod_base = OTHER; note = 2'-O-methylcytidine-3'-phosphate
  modified_base 10: mod_base = OTHER; note = 2'-O-methyluridine-3'-phosphate
  modified_base 12: mod_base = OTHER; note = 2'-O-methyluridine-3'-phosphate
  modified_base 15: mod_base = OTHER; note = 2'-O-methylcytidine-3'-phosphate
  modified_base 16: mod_base = OTHER; note = 2'-O-methylcytidine-3'-phosphate
  misc_feature 1..19: note = RNA
  misc_feature 20..21: note = DNA
gggatttcatgtaaccaagtt

SEQ ID NO: 1000 - DNA, 21 bp, synthetic construct
  source 1..21: mol_type = other DNA; note = Description of Artificial Sequence: Synthetic oligonucleotide; note = Description of Combined DNA/RNA Molecule: Synthetic oligonucleotide
  modified_base 7: mod_base = OTHER; note = 2'-O-methyluridine-3'-phosphate
  modified_base 9: mod_base = OTHER; note = 2'-O-methylcytidine-3'-phosphate
  misc_feature 1..19: note = RNA
  misc_feature 20..21: note = DNA
cttggttacatgaaatccctt

SEQ ID NO: 1001 - DNA, 21 bp, synthetic construct
  source 1..21: mol_type = other DNA; note = Description of Artificial Sequence: Synthetic oligonucleotide; note = Description of Combined DNA/RNA Molecule: Synthetic oligonucleotide
  modified_base 4: mod_base = OTHER; note = 2'-O-methyluridine-3'-phosphate
  modified_base 5: mod_base = OTHER; note = 2'-O-methyluridine-3'-phosphate
  modified_base 6: mod_base = OTHER; note = 2'-O-methyluridine-3'-phosphate
  modified_base 7: mod_base = OTHER; note = 2'-O-methylcytidine-3'-phosphate
  modified_base 9: mod_base = OTHER; note = 2'-O-methyluridine-3'-phosphate
  modified_base 11: mod_base = OTHER; note = 2'-O-methyluridine-3'-phosphate
  modified_base 14: mod_base = OTHER; note = 2'-O-methylcytidine-3'-phosphate
  modified_base 15: mod_base = OTHER; note = 2'-O-methylcytidine-3'-phosphate
  misc_feature 1..19: note = RNA
  misc_feature 20..21: note = DNA
ggatttcatgtaaccaagatt

SEQ ID NO: 1002 - DNA, 21 bp, synthetic construct
  source 1..21: mol_type = other DNA; note = Description of Artificial Sequence: Synthetic oligonucleotide; note = Description of Combined DNA/RNA Molecule: Synthetic oligonucleotide
  modified_base 8: mod_base = OTHER; note = 2'-O-methyluridine-3'-phosphate
  modified_base 10: mod_base = OTHER; note = 2'-O-methylcytidine-3'-phosphate
  misc_feature 1..19: note = RNA
  misc_feature 20..21: note = DNA
tcttggttacatgaaatcctt

SEQ ID NO: 1003 - DNA, 21 bp, synthetic construct
  source 1..21: mol_type = other DNA; note = Description of Artificial Sequence: Synthetic oligonucleotide; note = Description of Combined DNA/RNA Molecule: Synthetic oligonucleotide
  modified_base 1: mod_base = OTHER; note = 2'-O-methyluridine-3'-phosphate
  modified_base 2: mod_base = OTHER; note = 2'-O-methylcytidine-3'-phosphate
  modified_base 4: mod_base = OTHER; note = 2'-O-methyluridine-3'-phosphate
  modified_base 6: mod_base = OTHER; note = 2'-O-methyluridine-3'-phosphate
  modified_base 9: mod_base = OTHER; note = 2'-O-methylcytidine-3'-phosphate
  modified_base 10: mod_base = OTHER; note = 2'-O-methylcytidine-3'-phosphate
  modified_base 16: mod_base = OTHER; note = 2'-O-methyluridine-3'-phosphate
  modified_base 18: mod_base = OTHER; note = 2'-O-methyluridine-3'-phosphate
  modified_base 19: mod_base = OTHER; note = 2'-O-methyluridine-3'-phosphate
  misc_feature 1..19: note = RNA
  misc_feature 20..21: note = DNA
tcatgtaaccaagagtatttt

SEQ ID NO: 1004 - DNA, 21 bp, synthetic construct
  source 1..21: mol_type = other DNA; note = Description of Artificial Sequence: Synthetic oligonucleotide; note = Description of Combined DNA/RNA Molecule: Synthetic oligonucleotide
  modified_base 3: mod_base = OTHER; note = 2'-O-methyluridine-3'-phosphate
  modified_base 13: mod_base = OTHER; note = 2'-O-methyluridine-3'-phosphate
  modified_base 15: mod_base = OTHER; note = 2'-O-methylcytidine-3'-phosphate
  misc_feature 1..19: note = RNA
  misc_feature 20..21: note = DNA
aatactcttggttacatgatt

SEQ ID NO: 1005 - DNA, 21 bp, synthetic construct
  source 1..21: mol_type = other DNA; note = Description of Artificial Sequence: Synthetic oligonucleotide; note = Description of Combined DNA/RNA Molecule: Synthetic oligonucleotide
  modified_base 2: mod_base = OTHER; note = 2'-O-methyluridine-3'-phosphate
  modified_base 4: mod_base = OTHER; note = 2'-O-methyluridine-3'-phosphate
  modified_base 7: mod_base = OTHER; note = 2'-O-methylcytidine-3'-phosphate
  modified_base 8: mod_base = OTHER; note = 2'-O-methylcytidine-3'-phosphate
  modified_base 14: mod_base = OTHER; note = 2'-O-methyluridine-3'-phosphate
  modified_base 16: mod_base = OTHER; note = 2'-O-methyluridine-3'-phosphate
  modified_base 17: mod_base = OTHER; note = 2'-O-methyluridine-3'-phosphate
  modified_base 18: mod_base = OTHER; note = 2'-O-methylcytidine-3'-phosphate
  modified_base 19: mod_base = OTHER; note = 2'-O-methylcytidine-3'-phosphate
  misc_feature 1..19: note = RNA
  misc_feature 20..21: note = DNA
atgtaaccaagagtattcctt

SEQ ID NO: 1006 - DNA, 21 bp, synthetic construct
  source 1..21: mol_type = other DNA; note = Description of Artificial Sequence: Synthetic oligonucleotide; note = Description of Combined DNA/RNA Molecule: Synthetic oligonucleotide
  modified_base 5: mod_base = OTHER; note = 2'-O-methyluridine-3'-phosphate
  modified_base 15: mod_base = OTHER; note = 2'-O-methyluridine-3'-phosphate
  modified_base 17: mod_base = OTHER; note = 2'-O-methylcytidine-3'-phosphate
  misc_feature 1..19: note = RNA
  misc_feature 20..21: note = DNA
ggaatactcttggttacattt

SEQ ID NO: 1007 - DNA, 21 bp, synthetic construct
  source 1..21: mol_type = other DNA; note = Description of Artificial Sequence: Synthetic oligonucleotide; note = Description of Combined DNA/RNA Molecule: Synthetic oligonucleotide
  modified_base 1: mod_base = OTHER; note = 2'-O-methyluridine-3'-phosphate
  modified_base 3: mod_base = OTHER; note = 2'-O-methyluridine-3'-phosphate
  modified_base 6: mod_base = OTHER; note = 2'-O-methylcytidine-3'-phosphate
  modified_base 7: mod_base = OTHER; note = 2'-O-methylcytidine-3'-phosphate
  modified_base 13: mod_base = OTHER; note = 2'-O-methyluridine-3'-phosphate
  modified_base 15: mod_base = OTHER; note = 2'-O-methyluridine-3'-phosphate
  modified_base 16: mod_base = OTHER; note = 2'-O-methyluridine-3'-phosphate
  modified_base 17: mod_base = OTHER; note = 2'-O-methylcytidine-3'-phosphate
  modified_base 18: mod_base = OTHER; note = 2'-O-methylcytidine-3'-phosphate
  misc_feature 1..19: note = RNA
  misc_feature 20..21: note = DNA
tgtaaccaagagtattccatt

SEQ ID NO: 1008 - DNA, 21 bp, synthetic construct
  source 1..21: mol_type = other DNA; note = Description of Artificial Sequence: Synthetic oligonucleotide; note = Description of Combined DNA/RNA Molecule: Synthetic oligonucleotide
  modified_base 6: mod_base = OTHER; note = 2'-O-methyluridine-3'-phosphate
  modified_base 16: mod_base = OTHER; note = 2'-O-methyluridine-3'-phosphate
  modified_base 18: mod_base = OTHER; note = 2'-O-methylcytidine-3'-phosphate
  misc_feature 1..19: note = RNA
  misc_feature 20..21: note = DNA
tggaatactcttggttacatt

SEQ ID NO: 1009 - DNA, 21 bp, synthetic construct
  source 1..21: mol_type = other DNA; note = Description of Artificial Sequence: Synthetic oligonucleotide; note = Description of Combined DNA/RNA Molecule: Synthetic oligonucleotide
  modified_base 2: mod_base = OTHER; note = 2'-O-methyluridine-3'-phosphate
  modified_base 5: mod_base = OTHER; note = 2'-O-methylcytidine-3'-phosphate
  modified_base 6: mod_base = OTHER; note = 2'-O-methylcytidine-3'-phosphate
  modified_base 12: mod_base = OTHER; note = 2'-O-methyluridine-3'-phosphate
  modified_base 14: mod_base = OTHER; note = 2'-O-methyluridine-3'-phosphate
  modified_base 15: mod_base = OTHER; note = 2'-O-methyluridine-3'-phosphate
  modified_base 16: mod_base = OTHER; note = 2'-O-methylcytidine-3'-phosphate
  modified_base 17: mod_base = OTHER; note = 2'-O-methylcytidine-3'-phosphate
  modified_base 19: mod_base = OTHER; note = 2'-O-methyluridine-3'-phosphate
  misc_feature 1..19: note = RNA
  misc_feature 20..21: note = DNA
gtaaccaagagtattccattt

SEQ ID NO: 1010 - DNA, 21 bp, synthetic construct
  source 1..21: mol_type = other DNA; note = Description of Artificial Sequence: Synthetic oligonucleotide; note = Description of Combined DNA/RNA Molecule: Synthetic oligonucleotide
  modified_base 7: mod_base = OTHER; note = 2'-O-methyluridine-3'-phosphate
  modified_base 17: mod_base = OTHER; note = 2'-O-methyluridine-3'-phosphate
  misc_feature 1..19: note = RNA
  misc_feature 20..21: note = DNA
atggaatactcttggttactt

SEQ ID NO: 1011 - DNA, 21 bp, synthetic construct
  source 1..21: mol_type = other DNA; note = Description of Artificial Sequence: Synthetic oligonucleotide; note = Description of Combined DNA/RNA Molecule: Synthetic oligonucleotide
  modified_base 1: mod_base = OTHER; note = 2'-O-methyluridine-3'-phosphate
  modified_base 3: mod_base = OTHER; note = 2'-O-methylcytidine-3'-phosphate
  modified_base 4: mod_base = OTHER; note = 2'-O-methylcytidine-3'-phosphate
  modified_base 5: mod_base = OTHER; note = 2'-O-methyluridine-3'-phosphate
  modified_base 6: mod_base = OTHER; note = 2'-O-methyluridine-3'-phosphate
  modified_base 8: mod_base = OTHER; note = 2'-O-methylcytidine-3'-phosphate
  modified_base 9: mod_base = OTHER; note = 2'-O-methyluridine-3'-phosphate
  modified_base 13: mod_base = OTHER; note = 2'-O-methylcytidine-3'-phosphate
  modified_base 14: mod_base = OTHER; note = 2'-O-methyluridine-3'-phosphate
  modified_base 17: mod_base = OTHER; note = 2'-O-methyluridine-3'-phosphate
  modified_base 19: mod_base = OTHER; note = 2'-O-methyluridine-3'-phosphate
  misc_feature 1..19: note = RNA
  misc_feature 20..21: note = DNA
tgccttgctggactggtattt

SEQ ID NO: 1012 - DNA, 21 bp, synthetic construct
  source 1..21: mol_type = other DNA; note = Description of Artificial Sequence: Synthetic oligonucleotide; note = Description of Combined DNA/RNA Molecule: Synthetic oligonucleotide
  modified_base 2: mod_base = OTHER; note = 2'-O-methyluridine-3'-phosphate
  modified_base 5: mod_base = OTHER; note = 2'-O-methylcytidine-3'-phosphate
  modified_base 10: mod_base = OTHER; note = 2'-O-methylcytidine-3'-phosphate
  modified_base 13: mod_base = OTHER; note = 2'-O-methylcytidine-3'-phosphate
  modified_base 18: mod_base = OTHER; note = 2'-O-methylcytidine-3'-phosphate
  misc_feature 1..19: note = RNA
  misc_feature 20..21: note = DNA
ataccagtccagcaaggcatt

SEQ ID NO: 1013 - DNA, 21 bp, synthetic construct
  source 1..21: mol_type = other DNA; note = Description of Artificial Sequence: Synthetic oligonucleotide; note = Description of Combined DNA/RNA Molecule: Synthetic oligonucleotide
  modified_base 1: mod_base = OTHER; note = 2'-O-methyluridine-3'-phosphate
  modified_base 6: mod_base = OTHER; note = 2'-O-methylcytidine-3'-phosphate
  modified_base 9: mod_base = OTHER; note = 2'-O-methyluridine-3'-phosphate
  modified_base 11: mod_base = OTHER; note = 2'-O-methyluridine-3'-phosphate
  modified_base 12: mod_base = OTHER; note = 2'-O-methyluridine-3'-phosphate
  modified_base 13: mod_base = OTHER; note = 2'-O-methyluridine-3'-phosphate
  modified_base 14: mod_base = OTHER; note = 2'-O-methyluridine-3'-phosphate
  modified_base 15: mod_base = OTHER; note = 2'-O-methylcytidine-3'-phosphate
  modified_base 17: mod_base = OTHER; note = 2'-O-methylcytidine-3'-phosphate
  modified_base 18: mod_base = OTHER; note = 2'-O-methylcytidine-3'-phosphate
  modified_base 19: mod_base = OTHER; note = 2'-O-methyluridine-3'-phosphate
  misc_feature 1..19: note = RNA
  misc_feature 20..21: note = DNA
taaagcagtgttttcaccttt

SEQ ID NO: 1014 - DNA, 21 bp, synthetic construct
  source 1..21: mol_type = other DNA; note = Description of Artificial Sequence: Synthetic oligonucleotide; note = Description of Combined DNA/RNA Molecule: Synthetic oligonucleotide
  modified_base 10: mod_base = OTHER; note = 2'-O-methylcytidine-3'-phosphate
  modified_base 18: mod_base = OTHER; note = 2'-O-methyluridine-3'-phosphate
  misc_feature 1..19: note = RNA
  misc_feature 20..21: note = DNA
aggtgaaaacactgctttatt

SEQ ID NO: 1015 - DNA, 21 bp, synthetic construct
  source 1..21: mol_type = other DNA; note = Description of Artificial Sequence: Synthetic oligonucleotide; note = Description of Combined DNA/RNA Molecule: Synthetic oligonucleotide
  modified_base 2: mod_base = OTHER; note = 2'-O-methylcytidine-3'-phosphate
  modified_base 3: mod_base = OTHER; note = 2'-O-methylcytidine-3'-phosphate
  modified_base 4: mod_base = OTHER; note = 2'-O-methyluridine-3'-phosphate
  modified_base 5: mod_base = OTHER; note = 2'-O-methyluridine-3'-phosphate
  modified_base 7: mod_base = OTHER; note = 2'-O-methylcytidine-3'-phosphate
  modified_base 8: mod_base = OTHER; note = 2'-O-methyluridine-3'-phosphate
  modified_base 12: mod_base = OTHER; note = 2'-O-methylcytidine-3'-phosphate
  modified_base 13: mod_base = OTHER; note = 2'-O-methyluridine-3'-phosphate
  modified_base 16: mod_base = OTHER; note = 2'-O-methyluridine-3'-phosphate
  modified_base 18: mod_base = OTHER; note = 2'-O-methyluridine-3'-phosphate
  modified_base 19: mod_base = OTHER; note = 2'-O-methyluridine-3'-phosphate
  misc_feature 1..19: note = RNA
  misc_feature 20..21: note = DNA
gccttgctggactggtatttt

SEQ ID NO: 1016 - DNA, 21 bp, synthetic construct
  source 1..21: mol_type = other DNA; note = Description of Artificial Sequence: Synthetic oligonucleotide; note = Description of Combined DNA/RNA Molecule: Synthetic oligonucleotide
  modified_base 3: mod_base = OTHER; note = 2'-O-methyluridine-3'-phosphate
  modified_base 6: mod_base = OTHER; note = 2'-O-methylcytidine-3'-phosphate
  modified_base 11: mod_base = OTHER; note = 2'-O-methylcytidine-3'-phosphate
  modified_base 14: mod_base = OTHER; note = 2'-O-methylcytidine-3'-phosphate
  misc_feature 1..19: note = RNA
  misc_feature 20..21: note = DNA
aataccagtccagcaaggctt

SEQ ID NO: 1017 - DNA, 21 bp, synthetic construct
  source 1..21: mol_type = other DNA; note = Description of Artificial Sequence: Synthetic oligonucleotide; note = Description of Combined DNA/RNA Molecule: Synthetic oligonucleotide
  modified_base 1: mod_base = OTHER; note = 2'-O-methyluridine-3'-phosphate
  modified_base 3: mod_base = OTHER; note = 2'-O-methyluridine-3'-phosphate
  modified_base 4: mod_base = OTHER; note = 2'-O-methyluridine-3'-phosphate
  modified_base 5: mod_base = OTHER; note = 2'-O-methyluridine-3'-phosphate
  modified_base 6: mod_base = OTHER; note = 2'-O-methyluridine-3'-phosphate
  modified_base 7: mod_base = OTHER; note = 2'-O-methylcytidine-3'-phosphate
  modified_base 9: mod_base = OTHER; note = 2'-O-methylcytidine-3'-phosphate
  modified_base 10: mod_base = OTHER; note = 2'-O-methylcytidine-3'-phosphate
  modified_base 11: mod_base = OTHER; note = 2'-O-methyluridine-3'-phosphate
  modified_base 12: mod_base = OTHER; note = 2'-O-methylcytidine-3'-phosphate
  modified_base 14: mod_base = OTHER; note = 2'-O-methyluridine-3'-phosphate
  modified_base 16: mod_base = OTHER; note = 2'-O-methyluridine-3'-phosphate
  modified_base 18: mod_base = OTHER; note = 2'-O-methylcytidine-3'-phosphate
  modified_base 19: mod_base = OTHER; note = 2'-O-methyluridine-3'-phosphate
  misc_feature 1..19: note = RNA
  misc_feature 20..21: note = DNA
tgttttcacctcatatgcttt

SEQ ID NO: 1018 - DNA, 21 bp, synthetic construct
  source 1..21: mol_type = other DNA; note = Description of Artificial Sequence: Synthetic oligonucleotide; note = Description of Combined DNA/RNA Molecule: Synthetic oligonucleotide
  modified_base 3: mod_base = OTHER; note = 2'-O-methylcytidine-3'-phosphate
  modified_base 5: mod_base = OTHER; note = 2'-O-methyluridine-3'-phosphate
  modified_base 18: mod_base = OTHER; note = 2'-O-methylcytidine-3'-phosphate
  misc_feature 1..19: note = RNA
  misc_feature 20..21: note = DNA
agcatatgaggtgaaaacatt

SEQ ID NO: 1019 - DNA, 21 bp, synthetic construct
  source 1..21: mol_type = other DNA; note = Description of Artificial Sequence: Synthetic oligonucleotide; note = Description of Combined DNA/RNA Molecule: Synthetic oligonucleotide
  modified_base 2: mod_base = OTHER; note = 2'-O-methyluridine-3'-phosphate
  modified_base 3: mod_base = OTHER; note = 2'-O-methyluridine-3'-phosphate
  modified_base 4: mod_base = OTHER; note = 2'-O-methyluridine-3'-phosphate
  modified_base 5: mod_base = OTHER; note = 2'-O-methyluridine-3'-phosphate
  modified_base 6: mod_base = OTHER; note = 2'-O-methylcytidine-3'-phosphate
  modified_base 8: mod_base = OTHER; note = 2'-O-methylcytidine-3'-phosphate
  modified_base 9: mod_base = OTHER; note = 2'-O-methylcytidine-3'-phosphate
  modified_base 10: mod_base = OTHER; note = 2'-O-methyluridine-3'-phosphate
  modified_base 11: mod_base = OTHER; note = 2'-O-methylcytidine-3'-phosphate
  modified_base 13: mod_base = OTHER; note = 2'-O-methyluridine-3'-phosphate
  modified_base 15: mod_base = OTHER; note = 2'-O-methyluridine-3'-phosphate
  modified_base 17: mod_base = OTHER; note = 2'-O-methylcytidine-3'-phosphate
  modified_base 18: mod_base = OTHER; note = 2'-O-methyluridine-3'-phosphate
  misc_feature 1..19: note = RNA
  misc_feature 20..21: note = DNA
gttttcacctcatatgctatt

SEQ ID NO: 1020 - DNA, 21 bp, synthetic construct
  source 1..21: mol_type = other DNA; note = Description of Artificial Sequence: Synthetic oligonucleotide; note = Description of Combined DNA/RNA Molecule: Synthetic oligonucleotide
  modified_base 1: mod_base = OTHER; note = 2'-O-methyluridine-3'-phosphate
  modified_base 4: mod_base = OTHER; note = 2'-O-methylcytidine-3'-phosphate
  modified_base 6: mod_base = OTHER; note = 2'-O-methyluridine-3'-phosphate
  misc_feature 1..19: note = RNA
  misc_feature 20..21: note = DNA
tagcatatgaggtgaaaactt

SEQ ID NO: 1021 - DNA, 21 bp, synthetic construct
  source 1..21: mol_type = other DNA; note = Description of Artificial Sequence: Synthetic oligonucleotide; note = Description of Combined DNA/RNA Molecule: Synthetic oligonucleotide
  modified_base 1: mod_base = OTHER; note = 2'-O-methyluridine-3'-phosphate
  modified_base 2: mod_base = OTHER; note = 2'-O-methyluridine-3'-phosphate
  modified_base 3: mod_base = OTHER; note = 2'-O-methyluridine-3'-phosphate
  modified_base 4: mod_base = OTHER; note = 2'-O-methyluridine-3'-phosphate
  modified_base 5: mod_base = OTHER; note = 2'-O-methylcytidine-3'-phosphate
  modified_base 7: mod_base = OTHER; note = 2'-O-methylcytidine-3'-phosphate
  modified_base 8: mod_base = OTHER; note = 2'-O-methylcytidine-3'-phosphate
  modified_base 9: mod_base = OTHER; note = 2'-O-methyluridine-3'-phosphate
  modified_base 10: mod_base = OTHER; note = 2'-O-methylcytidine-3'-phosphate
  modified_base 12: mod_base = OTHER; note = 2'-O-methyluridine-3'-phosphate
  modified_base 14: mod_base = OTHER; note = 2'-O-methyluridine-3'-phosphate
  modified_base 16: mod_base = OTHER; note = 2'-O-methylcytidine-3'-phosphate
  modified_base 17: mod_base = OTHER; note = 2'-O-methyluridine-3'-phosphate
  modified_base 19: mod_base = OTHER; note = 2'-O-methyluridine-3'-phosphate
  misc_feature 1..19: note = RNA
  misc_feature 20..21: note = DNA
ttttcacctcatatgctattt

SEQ ID NO: 1022 - DNA, 21 bp, synthetic construct
  source 1..21: mol_type = other DNA; note = Description of Artificial Sequence: Synthetic oligonucleotide; note = Description of Combined DNA/RNA Molecule: Synthetic oligonucleotide
  modified_base 2: mod_base = OTHER; note = 2'-O-methyluridine-3'-phosphate
  modified_base 5: mod_base = OTHER; note = 2'-O-methylcytidine-3'-phosphate
  modified_base 7: mod_base = OTHER; note = 2'-O-methyluridine-3'-phosphate
  misc_feature 1..19: note = RNA
  misc_feature 20..21: note = DNA
atagcatatgaggtgaaaatt

SEQ ID NO: 1023 - DNA, 21 bp, synthetic construct
  source 1..21: mol_type = other DNA; note = Description of Artificial Sequence: Synthetic oligonucleotide; note = Description of Combined DNA/RNA Molecule: Synthetic oligonucleotide
  modified_base 1: mod_base = OTHER; note = 2'-O-methyluridine-3'-phosphate
  modified_base 2: mod_base = OTHER; note = 2'-O-methyluridine-3'-phosphate
  modified_base 3: mod_base = OTHER; note = 2'-O-methylcytidine-3'-phosphate
  modified_base 5: mod_base = OTHER; note = 2'-O-methylcytidine-3'-phosphate
  modified_base 6: mod_base = OTHER; note = 2'-O-methylcytidine-3'-phosphate
  modified_base 7: mod_base = OTHER; note = 2'-O-methyluridine-3'-phosphate
  modified_base 8: mod_base = OTHER; note = 2'-O-methylcytidine-3'-phosphate
  modified_base 10: mod_base = OTHER; note = 2'-O-methyluridine-3'-phosphate
  modified_base 12: mod_base = OTHER; note = 2'-O-methyluridine-3'-phosphate
  modified_base 14: mod_base = OTHER; note = 2'-O-methylcytidine-3'-phosphate
  modified_base 15: mod_base = OTHER; note = 2'-O-methyluridine-3'-phosphate
  modified_base 17: mod_base = OTHER; note = 2'-O-methyluridine-3'-phosphate
  modified_base 19: mod_base = OTHER; note = 2'-O-methyluridine-3'-phosphate
  misc_feature 1..19: note = RNA
  misc_feature 20..21: note = DNA
ttcacctcatatgctatgttt

SEQ ID NO: 1024 - DNA, 21 bp, synthetic construct
  source 1..21: mol_type = other DNA; note = Description of Artificial Sequence: Synthetic oligonucleotide; note = Description of Combined DNA/RNA Molecule: Synthetic oligonucleotide
  modified_base 2: mod_base = OTHER; note = 2'-O-methylcytidine-3'-phosphate
  modified_base 4: mod_base = OTHER; note = 2'-O-methyluridine-3'-phosphate
  modified_base 7: mod_base = OTHER; note = 2'-O-methylcytidine-3'-phosphate
  modified_base 9: mod_base = OTHER; note = 2'-O-methyluridine-3'-phosphate
  misc_feature 1..19: note = RNA
  misc_feature 20..21: note = DNA
acatagcatatgaggtgaatt

SEQ ID NO: 1025 - DNA, 21 bp, synthetic construct
  source 1..21: mol_type = other DNA; note = Description of Artificial Sequence: Synthetic oligonucleotide; note = Description of Combined DNA/RNA Molecule: Synthetic oligonucleotide
  modified_base 1: mod_base = OTHER; note = 2'-O-methylcytidine-3'-phosphate
  modified_base 3: mod_base = OTHER; note = 2'-O-methylcytidine-3'-phosphate
  modified_base 4: mod_base = OTHER; note = 2'-O-methylcytidine-3'-phosphate
  modified_base 5: mod_base = OTHER; note = 2'-O-methyluridine-3'-phosphate
  modified_base 6: mod_base = OTHER; note = 2'-O-methylcytidine-3'-phosphate
  modified_base 8: mod_base = OTHER; note = 2'-O-methyluridine-3'-phosphate
  modified_base 10: mod_base = OTHER; note = 2'-O-methyluridine-3'-phosphate
  modified_base 12: mod_base = OTHER; note = 2'-O-methylcytidine-3'-phosphate
  modified_base 13: mod_base = OTHER; note = 2'-O-methyluridine-3'-phosphate
  modified_base 15: mod_base = OTHER; note = 2'-O-methyluridine-3'-phosphate
  modified_base 17: mod_base = OTHER; note = 2'-O-methyluridine-3'-phosphate
  modified_base 18: mod_base = OTHER; note = 2'-O-methyluridine-3'-phosphate
  misc_feature 1..19: note = RNA
  misc_feature 20..21: note = DNA
cacctcatatgctatgttatt

SEQ ID NO: 1026 - DNA, 21 bp, synthetic construct
  source 1..21: mol_type = other DNA; note = Description of Artificial Sequence: Synthetic oligonucleotide; note = Description of Combined DNA/RNA Molecule: Synthetic oligonucleotide
  modified_base 1: mod_base = OTHER; note = 2'-O-methyluridine-3'-phosphate
  modified_base 4: mod_base = OTHER; note = 2'-O-methylcytidine-3'-phosphate
  modified_base 6: mod_base = OTHER; note = 2'-O-methyluridine-3'-phosphate
  modified_base 9: mod_base = OTHER; note = 2'-O-methylcytidine-3'-phosphate
  modified_base 11: mod_base = OTHER; note = 2'-O-methyluridine-3'-phosphate
  misc_feature 1..19: note = RNA
  misc_feature 20..21: note = DNA
taacatagcatatgaggtgtt

SEQ ID NO: 1027 - DNA, 21 bp, synthetic construct
  source 1..21: mol_type = other DNA; note = Description of Artificial Sequence: Synthetic oligonucleotide; note = Description of Combined DNA/RNA Molecule: Synthetic oligonucleotide
  modified_base 1: mod_base = OTHER; note = 2'-O-methylcytidine-3'-phosphate
  modified_base 2: mod_base = OTHER; note = 2'-O-methylcytidine-3'-phosphate
  modified_base 3: mod_base = OTHER; note = 2'-O-methyluridine-3'-phosphate
  modified_base 4: mod_base = OTHER; note = 2'-O-methyluridine-3'-phosphate
  modified_base 6: mod_base = OTHER; note = 2'-O-methylcytidine-3'-phosphate
  modified_base 7: mod_base = OTHER; note = 2'-O-methyluridine-3'-phosphate
  modified_base 11: mod_base = OTHER; note = 2'-O-methylcytidine-3'-phosphate
  modified_base 12: mod_base = OTHER; note = 2'-O-methyluridine-3'-phosphate
  modified_base 15: mod_base = OTHER; note = 2'-O-methyluridine-3'-phosphate
  modified_base 17: mod_base = OTHER; note = 2'-O-methyluridine-3'-phosphate
  modified_base 18: mod_base = OTHER; note = 2'-O-methyluridine-3'-phosphate
  modified_base 19: mod_base = OTHER; note = 2'-O-methyluridine-3'-phosphate
  misc_feature 1..19: note = RNA
  misc_feature 20..21: note = DNA
ccttgctggactggtattttt

SEQ ID NO: 1028 - DNA, 21 bp, synthetic construct
  source 1..21: mol_type = other DNA; note = Description of Artificial Sequence: Synthetic oligonucleotide; note = Description of Combined DNA/RNA Molecule: Synthetic oligonucleotide
  modified_base 4: mod_base = OTHER; note = 2'-O-methyluridine-3'-phosphate
  modified_base 7: mod_base = OTHER; note = 2'-O-methylcytidine-3'-phosphate
  modified_base 12: mod_base = OTHER; note = 2'-O-methylcytidine-3'-phosphate
  modified_base 15: mod_base = OTHER; note = 2'-O-methylcytidine-3'-phosphate
  misc_feature 1..19: note = RNA
  misc_feature 20..21: note = DNA
aaataccagtccagcaaggtt

SEQ ID NO: 1029 - DNA, 21 bp, synthetic construct
  source 1..21: mol_type = other DNA; note = Description of Artificial Sequence: Synthetic oligonucleotide; note = Description of Combined DNA/RNA Molecule: Synthetic oligonucleotide
  modified_base 2: mod_base = OTHER; note = 2'-O-methyluridine-3'-phosphate
  modified_base 4: mod_base = OTHER; note = 2'-O-methyluridine-3'-phosphate
  modified_base 6: mod_base = OTHER; note = 2'-O-methylcytidine-3'-phosphate
  modified_base 7: mod_base = OTHER; note = 2'-O-methyluridine-3'-phosphate
  modified_base 9: mod_base = OTHER; note = 2'-O-methyluridine-3'-phosphate
  modified_base 11: mod_base = OTHER; note = 2'-O-methyluridine-3'-phosphate
  modified_base 12: mod_base = OTHER; note = 2'-O-methyluridine-3'-phosphate
  modified_base 18: mod_base = OTHER; note = 2'-O-methyluridine-3'-phosphate
  modified_base 19: mod_base = OTHER; note = 2'-O-methylcytidine-3'-phosphate
  misc_feature 1..19: note = RNA
  misc_feature 20..21: note = DNA
atatgctatgttagaagtctt

SEQ ID NO: 1030 - DNA, 21 bp, synthetic construct
  source 1..21: mol_type = other DNA; note = Description of Artificial Sequence: Synthetic oligonucleotide; note = Description of Combined DNA/RNA Molecule: Synthetic oligonucleotide
  modified_base 7: mod_base = OTHER; note = 2'-O-methyluridine-3'-phosphate
  modified_base 10: mod_base = OTHER; note = 2'-O-methylcytidine-3'-phosphate
  modified_base 12: mod_base = OTHER; note = 2'-O-methyluridine-3'-phosphate
  modified_base 15: mod_base = OTHER; note = 2'-O-methylcytidine-3'-phosphate
  modified_base 17: mod_base = OTHER; note = 2'-O-methyluridine-3'-phosphate
  misc_feature 1..19: note = RNA
  misc_feature 20..21: note = DNA
gacttctaacatagcatattt

SEQ ID NO: 1031 - DNA, 21 bp, synthetic construct
  source 1..21: mol_type = other DNA; note = Description of Artificial Sequence: Synthetic oligonucleotide; note = Description of Combined DNA/RNA Molecule: Synthetic oligonucleotide
  modified_base 1: mod_base = OTHER; note = 2'-O-methyluridine-3'-phosphate
  modified_base 3: mod_base = OTHER; note = 2'-O-methyluridine-3'-phosphate
  modified_base 5: mod_base = OTHER; note = 2'-O-methylcytidine-3'-phosphate
  modified_base 6: mod_base = OTHER; note = 2'-O-methyluridine-3'-phosphate
  modified_base 8: mod_base = OTHER; note = 2'-O-methyluridine-3'-phosphate
  modified_base 10: mod_base = OTHER; note = 2'-O-methyluridine-3'-phosphate
  modified_base 11: mod_base = OTHER; note = 2'-O-methyluridine-3'-phosphate
  modified_base 17: mod_base = OTHER; note = 2'-O-methyluridine-3'-phosphate
  modified_base 18: mod_base = OTHER; note = 2'-O-methylcytidine-3'-phosphate
  modified_base 19: mod_base = OTHER; note = 2'-O-methylcytidine-3'-phosphate
  misc_feature 1..19: note = RNA
  misc_feature 20..21: note = DNA
tatgctatgttagaagtcctt

SEQ ID NO: 1032 - DNA, 21 bp, synthetic construct
  source 1..21: mol_type = other DNA; note = Description of Artificial Sequence: Synthetic oligonucleotide; note = Description of Combined DNA/RNA Molecule: Synthetic oligonucleotide
  modified_base 8: mod_base = OTHER; note = 2'-O-methyluridine-3'-phosphate
  modified_base 11: mod_base = OTHER; note = 2'-O-methylcytidine-3'-phosphate
  modified_base 13: mod_base = OTHER; note = 2'-O-methyluridine-3'-phosphate
  modified_base 16: mod_base = OTHER; note = 2'-O-methylcytidine-3'-phosphate
  modified_base 18: mod_base = OTHER; note = 2'-O-methyluridine-3'-phosphate
  misc_feature 1..19: note = RNA
  misc_feature 20..21: note = DNA
ggacttctaacatagcatatt

SEQ ID NO: 1033 - DNA, 21 bp, synthetic construct
  source 1..21: mol_type = other DNA; note = Description of Artificial Sequence: Synthetic oligonucleotide; note = Description of Combined DNA/RNA Molecule: Synthetic oligonucleotide
  modified_base 1: mod_base = OTHER; note = 2'-O-methyluridine-3'-phosphate
  modified_base 3: mod_base = OTHER; note = 2'-O-methylcytidine-3'-phosphate
  modified_base 4: mod_base = OTHER; note = 2'-O-methyluridine-3'-phosphate
  modified_base 6: mod_base = OTHER; note = 2'-O-methyluridine-3'-phosphate
  modified_base 8: mod_base = OTHER; note = 2'-O-methyluridine-3'-phosphate
  modified_base 9: mod_base = OTHER; note = 2'-O-methyluridine-3'-phosphate
  modified_base 15: mod_base = OTHER; note = 2'-O-methyluridine-3'-phosphate
  modified_base 16: mod_base = OTHER; note = 2'-O-methylcytidine-3'-phosphate
  modified_base 17: mod_base = OTHER; note = 2'-O-methylcytidine-3'-phosphate
  misc_feature 1..19: note = RNA
  misc_feature 20..21: note = DNA
tgctatgttagaagtccagtt

SEQ ID NO: 1034 - DNA, 21 bp, synthetic construct
  source 1..21: mol_type = other DNA; note = Description of Artificial Sequence: Synthetic oligonucleotide; note = Description of Combined DNA/RNA Molecule: Synthetic oligonucleotide
  modified_base 10: mod_base = OTHER; note = 2'-O-methyluridine-3'-phosphate
  modified_base 13: mod_base = OTHER; note = 2'-O-methylcytidine-3'-phosphate
  modified_base 15: mod_base = OTHER; note = 2'-O-methyluridine-3'-phosphate
  modified_base 18: mod_base = OTHER; note = 2'-O-methylcytidine-3'-phosphate
  misc_feature 1..19: note = RNA
  misc_feature 20..21: note = DNA
ctggacttctaacatagcatt

SEQ ID NO: 1035 - DNA, 21 bp, synthetic construct
  source 1..21: mol_type = other DNA; note = Description of Artificial Sequence: Synthetic oligonucleotide; note = Description of Combined DNA/RNA Molecule: Synthetic oligonucleotide
  modified_base 1: mod_base = OTHER; note = 2'-O-methylcytidine-3'-phosphate
  modified_base 2: mod_base = OTHER; note = 2'-O-methyluridine-3'-phosphate
  modified_base 3: mod_base = OTHER; note = 2'-O-methyluridine-3'-phosphate
  modified_base 5: mod_base = OTHER; note = 2'-O-methylcytidine-3'-phosphate
  modified_base 6: mod_base = OTHER; note = 2'-O-methyluridine-3'-phosphate
  modified_base 10: mod_base = OTHER; note = 2'-O-methylcytidine-3'-phosphate
  modified_base 11: mod_base = OTHER; note = 2'-O-methyluridine-3'-phosphate
  modified_base 14: mod_base = OTHER; note = 2'-O-methyluridine-3'-phosphate
  modified_base 16: mod_base = OTHER; note = 2'-O-methyluridine-3'-phosphate
  modified_base 17: mod_base = OTHER; note = 2'-O-methyluridine-3'-phosphate
  modified_base 18: mod_base = OTHER; note = 2'-O-methyluridine-3'-phosphate
  misc_feature 1..19: note = RNA
  misc_feature 20..21: note = DNA
cttgctggactggtatttgtt

SEQ ID NO: 1036 - DNA, 21 bp, synthetic construct
  source 1..21: mol_type = other DNA; note = Description of Artificial Sequence: Synthetic oligonucleotide; note = Description of Combined DNA/RNA Molecule: Synthetic oligonucleotide
  modified_base 1: mod_base = OTHER; note = 2'-O-methylcytidine-3'-phosphate
  modified_base 5: mod_base = OTHER; note = 2'-O-methyluridine-3'-phosphate
  modified_base 8: mod_base = OTHER; note = 2'-O-methylcytidine-3'-phosphate
  modified_base 13: mod_base = OTHER; note = 2'-O-methylcytidine-3'-phosphate
  modified_base 16: mod_base = OTHER; note = 2'-O-methylcytidine-3'-phosphate
  misc_feature 1..19: note = RNA
  misc_feature 20..21: note = DNA
caaataccagtccagcaagtt

SEQ ID NO: 1037 - DNA, 21 bp, synthetic construct
  source 1..21: mol_type = other DNA; note = Description of Artificial Sequence: Synthetic oligonucleotide; note = Description of Combined DNA/RNA Molecule: Synthetic oligonucleotide
  modified_base 3: mod_base = OTHER; note = 2'-O-methyluridine-3'-phosphate
  modified_base 4: mod_base = OTHER; note = 2'-O-methylcytidine-3'-phosphate
  modified_base 5: mod_base = OTHER; note = 2'-O-methylcytidine-3'-phosphate
  modified_base 9: mod_base = OTHER; note = 2'-O-methylcytidine-3'-phosphate
  modified_base 15: mod_base = OTHER; note = 2'-O-methylcytidine-3'-phosphate
  modified_base 18: mod_base = OTHER; note = 2'-O-methyluridine-3'-phosphate
  misc_feature 1..19: note = RNA
  misc_feature 20..21: note = DNA
agtccaggcagagacaatatt

SEQ ID NO: 1038 - DNA, 21 bp, synthetic construct
  source 1..21: mol_type = other DNA; note = Description of Artificial Sequence: Synthetic oligonucleotide; note = Description of Combined DNA/RNA Molecule: Synthetic oligonucleotide
  modified_base 1: mod_base = OTHER; note = 2'-O-methyluridine-3'-phosphate
  misc_feature 1..19: note = RNA
  misc_feature 20..21: note = DNA
tattgtctctgcctggacttt

SEQ ID NO: 1039 - DNA, 21 bp, synthetic construct
  source 1..21: mol_type = other DNA; note = Description of Artificial Sequence: Synthetic oligonucleotide; note = Description of Combined DNA/RNA Molecule: Synthetic oligonucleotide
  modified_base 1: mod_base = OTHER; note = 2'-O-methyluridine-3'-phosphate
  modified_base 2: mod_base = OTHER; note = 2'-O-methylcytidine-3'-phosphate
  modified_base 3: mod_base = OTHER; note = 2'-O-methylcytidine-3'-phosphate
  modified_base 7: mod_base = OTHER; note = 2'-O-methylcytidine-3'-phosphate
  modified_base 13: mod_base = OTHER; note = 2'-O-methylcytidine-3'-phosphate
  modified_base 16: mod_base = OTHER; note = 2'-O-methyluridine-3'-phosphate
  misc_feature 1..19: note = RNA
  misc_feature 20..21: note = DNA
tccaggcagagacaataaatt

SEQ ID NO: 1040 - DNA, 21 bp, synthetic construct
  source 1..21: mol_type = other DNA; note = Description of Artificial Sequence: Synthetic oligonucleotide; note = Description of Combined DNA/RNA Molecule: Synthetic oligonucleotide
  modified_base 3: mod_base = OTHER; note = 2'-O-methyluridine-3'-phosphate
  misc_feature 1..19: note = RNA
  misc_feature 20..21: note = DNA
tttattgtctctgcctggatt

SEQ ID NO: 1041 - DNA, 21 bp, synthetic construct
  source 1..21: mol_type = other DNA; note = Description of Artificial Sequence: Synthetic oligonucleotide; note = Description of Combined DNA/RNA Molecule: Synthetic oligonucleotide
  modified_base 2: mod_base = OTHER; note = 2'-O-methyluridine-3'-phosphate
  modified_base 9: mod_base = OTHER; note = 2'-O-methylcytidine-3'-phosphate
  modified_base 11: mod_base = OTHER; note = 2'-O-methylcytidine-3'-phosphate
  modified_base 12: mod_base = OTHER; note = 2'-O-methyluridine-3'-phosphate
  modified_base 13: mod_base = OTHER; note = 2'-O-methyluridine-3'-phosphate
  modified_base 14: mod_base = OTHER; note = 2'-O-methyluridine-3'-phosphate
  modified_base 15: mod_base = OTHER; note = 2'-O-methyluridine-3'-phosphate
  modified_base 16: mod_base = OTHER; note = 2'-O-methylcytidine-3'-phosphate
  modified_base 18: mod_base = OTHER; note = 2'-O-methyluridine-3'-phosphate
  modified_base 19: mod_base = OTHER; note = 2'-O-methyluridine-3'-phosphate
  misc_feature 1..19: note = RNA
  misc_feature 20..21: note = DNA
gtgaaaggcacttttcatttt

SEQ ID NO: 1042 - DNA, 21 bp, synthetic construct
  source 1..21: mol_type = other DNA; note = Description of Artificial Sequence: Synthetic oligonucleotide; note = Description of Combined DNA/RNA Molecule: Synthetic oligonucleotide
  modified_base 17: mod_base = OTHER; note = 2'-O-methylcytidine-3'-phosphate
  misc_feature 1..19: note = RNA
  misc_feature 20..21: note = DNA
aatgaaaagtgcctttcactt

SEQ ID NO: 1043 - DNA, 21 bp, synthetic construct
  source 1..21: mol_type = other DNA; note = Description of Artificial Sequence: Synthetic oligonucleotide; note = Description of Combined DNA/RNA Molecule: Synthetic oligonucleotide
  modified_base 1: mod_base = OTHER; note = 2'-O-methyluridine-3'-phosphate
  modified_base 5: mod_base = OTHER; note = 2'-O-methylcytidine-3'-phosphate
  modified_base 6: mod_base = OTHER; note = 2'-O-methyluridine-3'-phosphate
  modified_base 9: mod_base = OTHER; note = 2'-O-methyluridine-3'-phosphate
  modified_base 11: mod_base = OTHER; note = 2'-O-methyluridine-3'-phosphate
  modified_base 12: mod_base = OTHER; note = 2'-O-methyluridine-3'-phosphate
  modified_base 13: mod_base = OTHER; note = 2'-O-methyluridine-3'-phosphate
  modified_base 15: mod_base = OTHER; note = 2'-O-methyluridine-3'-phosphate
  modified_base 17: mod_base = OTHER; note = 2'-O-methyluridine-3'-phosphate
  modified_base 18: mod_base = OTHER; note = 2'-O-methylcytidine-3'-phosphate
  modified_base 19: mod_base = OTHER; note = 2'-O-methyluridine-3'-phosphate
  misc_feature 1..19: note = RNA
  misc_feature 20..21: note = DNA
tggactggtatttgtgtcttt

SEQ ID NO: 1044 - DNA, 21 bp, synthetic construct
  source 1..21: mol_type = other DNA; note = Description of Artificial Sequence: Synthetic oligonucleotide; note = Description of Combined DNA/RNA Molecule: Synthetic oligonucleotide
  modified_base 4: mod_base = OTHER; note = 2'-O-methylcytidine-3'-phosphate
  modified_base 6: mod_base = OTHER; note = 2'-O-methylcytidine-3'-phosphate
  modified_base 10: mod_base = OTHER; note = 2'-O-methyluridine-3'-phosphate
  modified_base 13: mod_base = OTHER; note = 2'-O-methylcytidine-3'-phosphate
  modified_base 18: mod_base = OTHER; note = 2'-O-methylcytidine-3'-phosphate
  misc_feature 1..19: note = RNA
  misc_feature 20..21: note = DNA
agacacaaataccagtccatt

SEQ ID NO: 1045 - DNA, 21 bp, synthetic construct
  source 1..21: mol_type = other DNA; note = Description of Artificial Sequence: Synthetic oligonucleotide; note = Description of Combined DNA/RNA Molecule: Synthetic oligonucleotide
  modified_base 2: mod_base = OTHER; note = 2'-O-methyluridine-3'-phosphate
  modified_base 3: mod_base = OTHER; note = 2'-O-methylcytidine-3'-phosphate
  modified_base 4: mod_base = OTHER; note = 2'-O-methyluridine-3'-phosphate
  modified_base 9: mod_base = OTHER; note = 2'-O-methylcytidine-3'-phosphate
  modified_base 10: mod_base = OTHER; note = 2'-O-methyluridine-3'-phosphate
  modified_base 13: mod_base = OTHER; note = 2'-O-methylcytidine-3'-phosphate
  modified_base 14: mod_base = OTHER; note = 2'-O-methylcytidine-3'-phosphate
  modified_base 15: mod_base = OTHER; note = 2'-O-methylcytidine-3'-phosphate
  modified_base 16: mod_base = OTHER; note = 2'-O-methyluridine-3'-phosphate
  modified_base 18: mod_base = OTHER; note = 2'-O-methylcytidine-3'-phosphate
  misc_feature 1..19: note = RNA
  misc_feature 20..21: note = DNA
gtctgaggctggccctacgtt

SEQ ID NO: 1046 - DNA, 21 bp, synthetic construct
  source 1..21: mol_type = other DNA; note = Description of Artificial Sequence: Synthetic oligonucleotide; note = Description of Combined DNA/RNA Molecule: Synthetic oligonucleotide
  modified_base 3: mod_base = OTHER; note = 2'-O-methyluridine-3'-phosphate
  modified_base 9: mod_base = OTHER; note = 2'-O-methylcytidine-3'-phosphate
  modified_base 15: mod_base = OTHER; note = 2'-O-methylcytidine-3'-phosphate
  misc_feature 1..19: note = RNA
  misc_feature 20..21: note = DNA
cgtagggccagcctcagactt

SEQ ID NO: 1047 - DNA, 21 bp, synthetic construct
  source 1..21: mol_type = other DNA; note = Description of Artificial Sequence: Synthetic oligonucleotide; note = Description of Combined DNA/RNA Molecule: Synthetic oligonucleotide
  modified_base 1: mod_base = OTHER; note = 2'-O-methylcytidine-3'-phosphate
  modified_base 2: mod_base = OTHER; note = 2'-O-methyluridine-3'-phosphate
  modified_base 7: mod_base = OTHER; note = 2'-O-methylcytidine-3'-phosphate
  modified_base 8: mod_base = OTHER; note = 2'-O-methyluridine-3'-phosphate
  modified_base 11: mod_base = OTHER; note = 2'-O-methylcytidine-3'-phosphate
  modified_base 12: mod_base = OTHER; note = 2'-O-methylcytidine-3'-phosphate
  modified_base 13: mod_base = OTHER; note = 2'-O-methylcytidine-3'-phosphate
  modified_base 14: mod_base = OTHER; note = 2'-O-methyluridine-3'-phosphate
  modified_base 16: mod_base = OTHER; note = 2'-O-methylcytidine-3'-phosphate
  misc_feature 1..19: note = RNA
  misc_feature 20..21: note = DNA
ctgaggctggccctacgggtt

SEQ ID NO: 1048 - DNA, 21 bp, synthetic construct
  source 1..21: mol_type = other DNA; note = Description of Artificial Sequence: Synthetic oligonucleotide; note = Description of Combined DNA/RNA Molecule: Synthetic oligonucleotide
  modified_base 5: mod_base = OTHER; note = 2'-O-methyluridine-3'-phosphate
  modified_base 11: mod_base = OTHER; note = 2'-O-methylcytidine-3'-phosphate
  modified_base 17: mod_base = OTHER; note = 2'-O-methylcytidine-3'-phosphate
  misc_feature 1..19: note = RNA
  misc_feature 20..21: note = DNA
cccgtagggccagcctcagtt

SEQ ID NO: 1049 - DNA, 21 bp, synthetic construct
  source 1..21: mol_type = other DNA; note = Description of Artificial Sequence: Synthetic oligonucleotide; note = Description of Combined DNA/RNA Molecule: Synthetic oligonucleotide
  modified_base 5: mod_base = OTHER; note = 2'-O-methylcytidine-3'-phosphate
  modified_base 6: mod_base = OTHER; note = 2'-O-methyluridine-3'-phosphate
  modified_base 9: mod_base = OTHER; note = 2'-O-methylcytidine-3'-phosphate
  modified_base 10: mod_base = OTHER; note = 2'-O-methylcytidine-3'-phosphate
  modified_base 11: mod_base = OTHER; note = 2'-O-methylcytidine-3'-phosphate
  modified_base 12: mod_base = OTHER; note = 2'-O-methyluridine-3'-phosphate
  modified_base 14: mod_base = OTHER; note = 2'-O-methylcytidine-3'-phosphate
  modified_base 18: mod_base = OTHER; note = 2'-O-methylcytidine-3'-phosphate
  misc_feature 1..19: note = RNA
  misc_feature 20..21: note = DNA
gaggctggccctacgggcatt

SEQ ID NO: 1050 - DNA, 21 bp, synthetic construct
  source 1..21: mol_type = other DNA; note = Description of Artificial Sequence: Synthetic oligonucleotide; note = Description of Combined DNA/RNA Molecule: Synthetic oligonucleotide
  modified_base 7: mod_base = OTHER; note = 2'-O-methyluridine-3'-phosphate
  modified_base 13: mod_base = OTHER; note = 2'-O-methylcytidine-3'-phosphate
  misc_feature 1..19: note = RNA
  misc_feature 20..21: note = DNA
tgcccgtagggccagcctctt

SEQ ID NO: 1051 - DNA, 21 bp, synthetic construct
  source 1..21: mol_type = other DNA; note = Description of Artificial Sequence: Synthetic oligonucleotide; note = Description of Combined DNA/RNA Molecule: Synthetic oligonucleotide
  modified_base 4: mod_base = OTHER; note = 2'-O-methylcytidine-3'-phosphate
  modified_base 5: mod_base = OTHER; note = 2'-O-methyluridine-3'-phosphate
  modified_base 8: mod_base = OTHER; note = 2'-O-methylcytidine-3'-phosphate
  modified_base 9: mod_base = OTHER; note = 2'-O-methylcytidine-3'-phosphate
  modified_base 10: mod_base = OTHER; note = 2'-O-methylcytidine-3'-phosphate
  modified_base 11: mod_base = OTHER; note = 2'-O-methyluridine-3'-phosphate
  modified_base 13: mod_base = OTHER; note = 2'-O-methylcytidine-3'-phosphate
  modified_base 17: mod_base = OTHER; note = 2'-O-methylcytidine-3'-phosphate
  modified_base 19: mod_base = OTHER; note = 2'-O-methylcytidine-3'-phosphate
  misc_feature 1..19: note = RNA
  misc_feature 20..21: note = DNA
aggctggccctacgggcactt

SEQ ID NO: 1052 - DNA, 21 bp, synthetic construct
  source 1..21: mol_type = other DNA; note = Description of Artificial Sequence: Synthetic oligonucleotide; note = Description of Combined DNA/RNA Molecule: Synthetic oligonucleotide
  modified_base 8: mod_base = OTHER; note = 2'-O-methyluridine-3'-phosphate
  modified_base 14: mod_base = OTHER; note = 2'-O-methylcytidine-3'-phosphate
  misc_feature 1..19: note = RNA
  misc_feature 20..21: note = DNA
gtgcccgtagggccagccttt

SEQ ID NO: 1053 - DNA, 21 bp, synthetic construct
  source 1..21: mol_type = other DNA; note = Description of Artificial Sequence: Synthetic oligonucleotide; note = Description of Combined DNA/RNA Molecule: Synthetic oligonucleotide
  modified_base 2: mod_base = OTHER; note = 2'-O-methylcytidine-3'-phosphate
  modified_base 3: mod_base = OTHER; note = 2'-O-methyluridine-3'-phosphate
  modified_base 6: mod_base = OTHER; note = 2'-O-methylcytidine-3'-phosphate
  modified_base 7: mod_base = OTHER; note = 2'-O-methylcytidine-3'-phosphate
  modified_base 8: mod_base = OTHER; note = 2'-O-methylcytidine-3'-phosphate
  modified_base 9: mod_base = OTHER; note = 2'-O-methyluridine-3'-phosphate
  modified_base 11: mod_base = OTHER; note = 2'-O-methylcytidine-3'-phosphate
  modified_base 15: mod_base = OTHER; note = 2'-O-methylcytidine-3'-phosphate
  modified_base 17: mod_base = OTHER; note = 2'-O-methylcytidine-3'-phosphate
  modified_base 18: mod_base = OTHER; note = 2'-O-methylcytidine-3'-phosphate
  misc_feature 1..19: note = RNA
  misc_feature 20..21: note = DNA
gctggccctacgggcaccgtt

SEQ ID NO: 1054 - DNA, 21 bp, synthetic construct
  source 1..21: mol_type = other DNA; note = Description of Artificial Sequence: Synthetic oligonucleotide; note = Description of Combined DNA/RNA Molecule: Synthetic oligonucleotide
  modified_base 10: mod_base = OTHER; note = 2'-O-methyluridine-3'-phosphate
  modified_base 16: mod_base = OTHER; note = 2'-O-methylcytidine-3'-phosphate
  misc_feature 1..19: note = RNA
  misc_feature 20..21: note = DNA
cggtgcccgtagggccagctt

SEQ ID NO: 1055 - DNA, 21 bp, synthetic construct
  source 1..21: mol_type = other DNA; note = Description of Artificial Sequence: Synthetic oligonucleotide; note = Description of Combined DNA/RNA Molecule: Synthetic oligonucleotide
  modified_base 1: mod_base = OTHER; note = 2'-O-methylcytidine-3'-phosphate
  modified_base 2: mod_base = OTHER; note = 2'-O-methyluridine-3'-phosphate
  modified_base 5: mod_base = OTHER; note = 2'-O-methylcytidine-3'-phosphate
  modified_base 6: mod_base = OTHER; note = 2'-O-methylcytidine-3'-phosphate
  modified_base 7: mod_base = OTHER; note = 2'-O-methylcytidine-3'-phosphate
  modified_base 8: mod_base = OTHER; note = 2'-O-methyluridine-3'-phosphate
  modified_base 10: mod_base = OTHER; note = 2'-O-methylcytidine-3'-phosphate
  modified_base 14: mod_base = OTHER; note = 2'-O-methylcytidine-3'-phosphate
  modified_base 16: mod_base = OTHER; note = 2'-O-methylcytidine-3'-phosphate
  modified_base 17: mod_base = OTHER; note = 2'-O-methylcytidine-3'-phosphate
  misc_feature 1..19: note = RNA
  misc_feature 20..21: note = DNA
ctggccctacgggcaccggtt

SEQ ID NO: 1056 - DNA, 21 bp, synthetic construct
  source 1..21: mol_type = other DNA; note = Description of Artificial Sequence: Synthetic oligonucleotide; note = Description of Combined DNA/RNA Molecule: Synthetic oligonucleotide
  modified_base 11: mod_base = OTHER; note = 2'-O-methyluridine-3'-phosphate
  modified_base 17: mod_base = OTHER; note = 2'-O-methylcytidine-3'-phosphate
  misc_feature 1..19: note = RNA
  misc_feature 20..21: note = DNA
ccggtgcccgtagggccagtt

SEQ ID NO: 1057 - DNA, 21 bp, synthetic construct
  source 1..21: mol_type = other DNA; note = Description of Artificial Sequence: Synthetic oligonucleotide; note = Description of Combined DNA/RNA Molecule: Synthetic oligonucleotide
  modified_base 3: mod_base = OTHER; note = 2'-O-methylcytidine-3'-phosphate
  modified_base 4: mod_base = OTHER; note = 2'-O-methylcytidine-3'-phosphate
  modified_base 5: mod_base = OTHER; note = 2'-O-methylcytidine-3'-phosphate
  modified_base 6: mod_base = OTHER; note = 2'-O-methyluridine-3'-phosphate
  modified_base 8: mod_base = OTHER; note = 2'-O-methylcytidine-3'-phosphate
  modified_base 12: mod_base = OTHER; note = 2'-O-methylcytidine-3'-phosphate
  modified_base 14: mod_base = OTHER; note = 2'-O-methylcytidine-3'-phosphate
  modified_base 15: mod_base = OTHER; note = 2'-O-methylcytidine-3'-phosphate
  modified_base 18: mod_base = OTHER; note = 2'-O-methyluridine-3'-phosphate
  misc_feature 1..19: note = RNA
  misc_feature 20..21: note = DNA
ggccctacgggcaccggtgtt

SEQ ID NO: 1058 - DNA, 21 bp, synthetic construct
  source 1..21: mol_type = other DNA; note = Description of Artificial Sequence: Synthetic oligonucleotide; note = Description of Combined DNA/RNA Molecule: Synthetic oligonucleotide
  modified_base 1: mod_base = OTHER; note = 2'-O-methylcytidine-3'-phosphate
  modified_base 13: mod_base = OTHER; note = 2'-O-methyluridine-3'-phosphate
  misc_feature 1..19: note = RNA
  misc_feature 20..21: note = DNA
caccggtgcccgtagggcctt

SEQ ID NO: 1059 - DNA, 21 bp, synthetic construct
  source 1..21: mol_type = other DNA; note = Description of Artificial Sequence: Synthetic oligonucleotide; note = Description of Combined DNA/RNA Molecule: Synthetic oligonucleotide
  modified_base 1: mod_base = OTHER; note = 2'-O-methylcytidine-3'-phosphate
  modified_base 2: mod_base = OTHER; note = 2'-O-methylcytidine-3'-phosphate
  modified_base 4: mod_base = OTHER; note = 2'-O-methylcytidine-3'-phosphate
  modified_base 5: mod_base = OTHER; note = 2'-O-methyluridine-3'-phosphate
  modified_base 6: mod_base = OTHER; note = 2'-O-methylcytidine-3'-phosphate
  modified_base 8: mod_base = OTHER; note = 2'-O-methyluridine-3'-phosphate
  modified_base 9: mod_base = OTHER; note = 2'-O-methyluridine-3'-phosphate
  modified_base 10: mod_base = OTHER; note = 2'-O-methylcytidine-3'-phosphate
  modified_base 11: mod_base = OTHER; note = 2'-O-methyluridine-3'-phosphate
  modified_base 12: mod_base = OTHER; note = 2'-O-methyluridine-3'-phosphate
  modified_base 15: mod_base = OTHER; note = 2'-O-methylcytidine-3'-phosphate
  misc_feature 1..19: note = RNA
  misc_feature 20..21: note = DNA
ccactcattcttggcaggatt

SEQ ID NO: 1060 - DNA, 21 bp, synthetic construct
  source 1..21: mol_type = other DNA; note = Description of Artificial Sequence: Synthetic oligonucleotide; note = Description of Combined DNA/RNA Molecule: Synthetic oligonucleotide
  modified_base 7: mod_base = OTHER; note = 2'-O-methylcytidine-3'-phosphate
  misc_feature 1..19: note = RNA
  misc_feature 20..21: note = DNA
tcctgccaagaatgagtggtt

SEQ ID NO: 1061 - DNA, 21 bp, synthetic construct
  source 1..21: mol_type = other DNA; note = Description of Artificial Sequence: Synthetic oligonucleotide; note = Description of Combined DNA/RNA Molecule: Synthetic oligonucleotide
  modified_base 1: mod_base = OTHER; note = 2'-O-methylcytidine-3'-phosphate
  modified_base 2: mod_base = OTHER; note = 2'-O-methylcytidine-3'-phosphate
  modified_base 3: mod_base = OTHER; note = 2'-O-methyluridine-3'-phosphate
  modified_base 5: mod_base = OTHER; note = 2'-O-methylcytidine-3'-phosphate
  modified_base 9: mod_base = OTHER; note = 2'-O-methylcytidine-3'-phosphate
  modified_base 11: mod_base = OTHER; note = 2'-O-methylcytidine-3'-phosphate
  modified_base 12: mod_base = OTHER; note = 2'-O-methylcytidine-3'-phosphate
  modified_base 15: mod_base = OTHER; note = 2'-O-methyluridine-3'-phosphate
  modified_base 19: mod_base = OTHER; note = 2'-O-methyluridine-3'-phosphate
  misc_feature 1..19: note = RNA
  misc_feature 20..21: note = DNA
cctacgggcaccggtgaattt

SEQ ID NO: 1062 - DNA, 21 bp, synthetic construct
  source 1..21: mol_type = other DNA; note = Description of Artificial Sequence: Synthetic oligonucleotide; note = Description of Combined DNA/RNA Molecule: Synthetic oligonucleotide
  modified_base 4: mod_base = OTHER; note = 2'-O-methylcytidine-3'-phosphate
  modified_base 16: mod_base = OTHER; note = 2'-O-methyluridine-3'-phosphate
  misc_feature 1..19: note = RNA
  misc_feature 20..21: note = DNA
attcaccggtgcccgtaggtt

SEQ ID NO: 1063 - DNA, 21 bp, synthetic construct
  source 1..21: mol_type = other DNA; note = Description of Artificial Sequence: Synthetic oligonucleotide; note = Description of Combined DNA/RNA Molecule: Synthetic oligonucleotide
  modified_base 1: mod_base = OTHER; note = 2'-O-methylcytidine-3'-phosphate
  modified_base 2: mod_base = OTHER; note = 2'-O-methyluridine-3'-phosphate
  modified_base 4: mod_base = OTHER; note = 2'-O-methylcytidine-3'-phosphate
  modified_base 8: mod_base = OTHER; note = 2'-O-methylcytidine-3'-phosphate
  modified_base 10: mod_base = OTHER; note = 2'-O-methylcytidine-3'-phosphate
  modified_base 11: mod_base = OTHER; note = 2'-O-methylcytidine-3'-phosphate
  modified_base 14: mod_base = OTHER; note = 2'-O-methyluridine-3'-phosphate
  modified_base 18: mod_base = OTHER; note = 2'-O-methyluridine-3'-phosphate
  modified_base 19: mod_base = OTHER; note = 2'-O-methylcytidine-3'-phosphate
  misc_feature 1..19: note = RNA
  misc_feature 20..21: note = DNA
ctacgggcaccggtgaatctt

SEQ ID NO: 1064 - DNA, 21 bp, synthetic construct
  source 1..21: mol_type = other DNA; note = Description of Artificial Sequence: Synthetic oligonucleotide; note = Description of Combined DNA/RNA Molecule: Synthetic oligonucleotide
  modified_base 5: mod_base = OTHER; note = 2'-O-methylcytidine-3'-phosphate
  modified_base 17: mod_base = OTHER; note = 2'-O-methyluridine-3'-phosphate
  misc_feature 1..19: note = RNA
  misc_feature 20..21: note = DNA
gattcaccggtgcccgtagtt

SEQ ID NO: 1065 - DNA, 21 bp, synthetic construct
  source 1..21: mol_type = other DNA; note = Description of Artificial Sequence: Synthetic oligonucleotide; note = Description of Combined DNA/RNA Molecule: Synthetic oligonucleotide
  modified_base 1: mod_base = OTHER; note = 2'-O-methyluridine-3'-phosphate
  modified_base 3: mod_base = OTHER; note = 2'-O-methylcytidine-3'-phosphate
  modified_base 7: mod_base = OTHER; note = 2'-O-methylcytidine-3'-phosphate
  modified_base 9: mod_base = OTHER; note = 2'-O-methylcytidine-3'-phosphate
  modified_base 10: mod_base = OTHER; note = 2'-O-methylcytidine-3'-phosphate
  modified_base 13: mod_base = OTHER; note = 2'-O-methyluridine-3'-phosphate
  modified_base 17: mod_base = OTHER; note = 2'-O-methyluridine-3'-phosphate
  modified_base 18: mod_base = OTHER; note = 2'-O-methylcytidine-3'-phosphate
  modified_base 19: mod_base = OTHER; note = 2'-O-methylcytidine-3'-phosphate
  misc_feature 1..19: note = RNA
  misc_feature 20..21: note = DNA
tacgggcaccggtgaatcctt

SEQ ID NO: 1066 - DNA, 21 bp, synthetic construct
  source 1..21: mol_type = other DNA; note = Description of Artificial Sequence: Synthetic oligonucleotide; note = Description of Combined DNA/RNA Molecule: Synthetic oligonucleotide
  modified_base 6: mod_base = OTHER; note = 2'-O-methylcytidine-3'-phosphate
  modified_base 18: mod_base = OTHER; note = 2'-O-methyluridine-3'-phosphate
  misc_feature 1..19: note = RNA
  misc_feature 20..21: note = DNA
ggattcaccggtgcccgtatt

SEQ ID NO: 1067 - DNA, 21 bp, synthetic construct
  source 1..21: mol_type = other DNA; note = Description of Artificial Sequence: Synthetic oligonucleotide; note = Description of Combined DNA/RNA Molecule: Synthetic oligonucleotide
  modified_base 2: mod_base = OTHER; note = 2'-O-methylcytidine-3'-phosphate
  modified_base 6: mod_base = OTHER; note = 2'-O-methylcytidine-3'-phosphate
  modified_base 8: mod_base = OTHER; note = 2'-O-methylcytidine-3'-phosphate
  modified_base 9: mod_base = OTHER; note = 2'-O-methylcytidine-3'-phosphate
  modified_base 12: mod_base = OTHER; note = 2'-O-methyluridine-3'-phosphate
  modified_base 16: mod_base = OTHER; note = 2'-O-methyluridine-3'-phosphate
  modified_base 17: mod_base = OTHER; note = 2'-O-methylcytidine-3'-phosphate
  modified_base 18: mod_base = OTHER; note = 2'-O-methylcytidine-3'-phosphate
  misc_feature 1..19: note = RNA
  misc_feature 20..21: note = DNA
acgggcaccggtgaatccatt

SEQ ID NO: 1068 - DNA, 21 bp, synthetic construct
  source 1..21: mol_type = other DNA; note = Description of Artificial Sequence: Synthetic oligonucleotide; note = Description of Combined DNA/RNA Molecule: Synthetic oligonucleotide
  modified_base 7: mod_base = OTHER; note = 2'-O-methylcytidine-3'-phosphate
  misc_feature 1..19: note = RNA
  misc_feature 20..21: note = DNA
tggattcaccggtgcccgttt

SEQ ID NO: 1069 - DNA, 21 bp, synthetic construct
  source 1..21: mol_type = other DNA; note = Description of Artificial Sequence: Synthetic oligonucleotide; note = Description of Combined DNA/RNA Molecule: Synthetic oligonucleotide
  modified_base 2: mod_base = OTHER; note = 2'-O-methylcytidine-3'-phosphate
  modified_base 4: mod_base = OTHER; note = 2'-O-methylcytidine-3'-phosphate
  modified_base 5: mod_base = OTHER; note = 2'-O-methylcytidine-3'-phosphate
  modified_base 8: mod_base = OTHER; note = 2'-O-methyluridine-3'-phosphate
  modified_base 12: mod_base = OTHER; note = 2'-O-methyluridine-3'-phosphate
  modified_base 13: mod_base = OTHER; note = 2'-O-methylcytidine-3'-phosphate
  modified_base 14: mod_base = OTHER; note = 2'-O-methylcytidine-3'-phosphate
  modified_base 18: mod_base = OTHER; note = 2'-O-methyluridine-3'-phosphate
  misc_feature 1..19: note = RNA
  misc_feature 20..21: note = DNA
gcaccggtgaatccaagtgtt

SEQ ID NO: 1070 - DNA, 21 bp, synthetic construct
  source 1..21: mol_type = other DNA; note = Description of Artificial Sequence: Synthetic oligonucleotide; note = Description of Combined DNA/RNA Molecule: Synthetic oligonucleotide
  modified_base 1: mod_base = OTHER; note = 2'-O-methylcytidine-3'-phosphate
  modified_base 11: mod_base = OTHER; note = 2'-O-methylcytidine-3'-phosphate
  misc_feature 1..19: note = RNA
  misc_feature 20..21: note = DNA
cacttggattcaccggtgctt

SEQ ID NO: 1071 - DNA, 21 bp, synthetic construct
  source 1..21: mol_type = other DNA; note = Description of Artificial Sequence: Synthetic oligonucleotide; note = Description of Combined DNA/RNA Molecule: Synthetic oligonucleotide
  modified_base 1: mod_base = OTHER; note = 2'-O-methylcytidine-3'-phosphate
  modified_base 3: mod_base = OTHER; note = 2'-O-methylcytidine-3'-phosphate
  modified_base 4: mod_base = OTHER; note = 2'-O-methylcytidine-3'-phosphate
  modified_base 7: mod_base = OTHER; note = 2'-O-methyluridine-3'-phosphate
  modified_base 11: mod_base = OTHER; note = 2'-O-methyluridine-3'-phosphate
  modified_base 12: mod_base = OTHER; note = 2'-O-methylcytidine-3'-phosphate
  modified_base 13: mod_base = OTHER; note = 2'-O-methylcytidine-3'-phosphate
  modified_base 17: mod_base = OTHER; note = 2'-O-methyluridine-3'-phosphate
  modified_base 19: mod_base = OTHER; note = 2'-O-methyluridine-3'-phosphate
  misc_feature 1..19: note = RNA
  misc_feature 20..21: note = DNA
caccggtgaatccaagtgttt

SEQ ID NO: 1072 - DNA, 21 bp, synthetic construct
  source 1..21: mol_type = other DNA; note = Description of Artificial Sequence: Synthetic oligonucleotide; note = Description of Combined DNA/RNA Molecule: Synthetic oligonucleotide
  modified_base 2: mod_base = OTHER; note = 2'-O-methylcytidine-3'-phosphate
  modified_base 12: mod_base = OTHER; note = 2'-O-methylcytidine-3'-phosphate
  misc_feature 1..19: note = RNA
  misc_feature 20..21: note = DNA
acacttggattcaccggtgtt

SEQ ID NO: 1073 - DNA, 21 bp, synthetic construct
  source 1..21: mol_type = other DNA; note = Description of Artificial Sequence: Synthetic oligonucleotide; note = Description of Combined DNA/RNA Molecule: Synthetic oligonucleotide
  modified_base 1: mod_base = OTHER; note = 2'-O-methyluridine-3'-phosphate
  modified_base 3: mod_base = OTHER; note = 2'-O-methyluridine-3'-phosphate
  modified_base 6: mod_base = OTHER; note = 2'-O-methylcytidine-3'-phosphate
  modified_base 7: mod_base = OTHER; note = 2'-O-methylcytidine-3'-phosphate
  modified_base 9: mod_base = OTHER; note = 2'-O-methyluridine-3'-phosphate
  modified_base 11: mod_base = OTHER; note = 2'-O-methylcytidine-3'-phosphate
  modified_base 13: mod_base = OTHER; note = 2'-O-methyluridine-3'-phosphate
  modified_base 15: mod_base = OTHER; note = 2'-O-methyluridine-3'-phosphate
  modified_base 17: mod_base = OTHER; note = 2'-O-methyluridine-3'-phosphate
  modified_base 18: mod_base = OTHER; note = 2'-O-methyluridine-3'-phosphate
  modified_base 19: mod_base = OTHER; note = 2'-O-methylcytidine-3'-phosphate
  misc_feature 1..19: note = RNA
  misc_feature 20..21: note = DNA
tgtggccatgcatgtgttctt

SEQ ID NO: 1074 - DNA, 21 bp, synthetic construct
  source 1..21: mol_type = other DNA; note = Description of Artificial Sequence: Synthetic oligonucleotide; note = Description of Combined DNA/RNA Molecule: Synthetic oligonucleotide
  modified_base 4: mod_base = OTHER; note = 2'-O-methylcytidine-3'-phosphate
  modified_base 6: mod_base = OTHER; note = 2'-O-methylcytidine-3'-phosphate
  modified_base 10: mod_base = OTHER; note = 2'-O-methylcytidine-3'-phosphate
  modified_base 16: mod_base = OTHER; note = 2'-O-methylcytidine-3'-phosphate
  modified_base 18: mod_base = OTHER; note = 2'-O-methylcytidine-3'-phosphate
  misc_feature 1..19: note = RNA
  misc_feature 20..21: note = DNA
gaacacatgcatggccacatt

SEQ ID NO: 1075 - DNA, 21 bp, synthetic construct
  source 1..21: mol_type = other DNA; note = Description of Artificial Sequence: Synthetic oligonucleotide; note = Description of Combined DNA/RNA Molecule: Synthetic oligonucleotide
  modified_base 2: mod_base = OTHER; note = 2'-O-methyluridine-3'-phosphate
  modified_base 5: mod_base = OTHER; note = 2'-O-methylcytidine-3'-phosphate
  modified_base 6: mod_base = OTHER; note = 2'-O-methylcytidine-3'-phosphate
  modified_base 8: mod_base = OTHER; note = 2'-O-methyluridine-3'-phosphate
  modified_base 10: mod_base = OTHER; note = 2'-O-methylcytidine-3'-phosphate
  modified_base 12: mod_base = OTHER; note = 2'-O-methyluridine-3'-phosphate
  modified_base 14: mod_base = OTHER; note = 2'-O-methyluridine-3'-phosphate
  modified_base 16: mod_base = OTHER; note = 2'-O-methyluridine-3'-phosphate
  modified_base 17: mod_base = OTHER; note = 2'-O-methyluridine-3'-phosphate
  modified_base 18: mod_base = OTHER; note = 2'-O-methylcytidine-3'-phosphate
  misc_feature 1..19: note = RNA
  misc_feature 20..21: note = DNA
gtggccatgcatgtgttcatt

SEQ ID NO: 1076 - DNA, 21 bp, synthetic construct
  source 1..21: mol_type = other DNA; note = Description of Artificial Sequence: Synthetic oligonucleotide; note = Description of Combined DNA/RNA Molecule: Synthetic oligonucleotide
  modified_base 5: mod_base = OTHER; note = 2'-O-methylcytidine-3'-phosphate
  modified_base 7: mod_base = OTHER; note = 2'-O-methylcytidine-3'-phosphate
  modified_base 11: mod_base = OTHER; note = 2'-O-methylcytidine-3'-phosphate
  modified_base 17: mod_base = OTHER; note = 2'-O-methylcytidine-3'-phosphate
  misc_feature 1..19: note = RNA
  misc_feature 20..21: note = DNA
tgaacacatgcatggccactt

SEQ ID NO: 1077 - DNA, 21 bp, synthetic construct
  source 1..21: mol_type = other DNA; note = Description of Artificial Sequence: Synthetic oligonucleotide; note = Description of Combined DNA/RNA Molecule: Synthetic oligonucleotide
  modified_base 2: mod_base = OTHER; note = 2'-O-methylcytidine-3'-phosphate
  modified_base 3: mod_base = OTHER; note = 2'-O-methylcytidine-3'-phosphate
  modified_base 5: mod_base = OTHER; note = 2'-O-methyluridine-3'-phosphate
  modified_base 7: mod_base = OTHER; note = 2'-O-methylcytidine-3'-phosphate
  modified_base 9: mod_base = OTHER; note = 2'-O-methyluridine-3'-phosphate
  modified_base 11: mod_base = OTHER; note = 2'-O-methyluridine-3'-phosphate
  modified_base 13: mod_base = OTHER; note = 2'-O-methyluridine-3'-phosphate
  modified_base 14: mod_base = OTHER; note = 2'-O-methyluridine-3'-phosphate
  modified_base 15: mod_base = OTHER; note = 2'-O-methylcytidine-3'-phosphate
  misc_feature 1..19: note = RNA
  misc_feature 20..21: note = DNA
gccatgcatgtgttcagaatt

SEQ ID NO: 1078 - DNA, 21 bp, synthetic construct
  source 1..21: mol_type = other DNA; note = Description of Artificial Sequence: Synthetic oligonucleotide; note = Description of Combined DNA/RNA Molecule: Synthetic oligonucleotide
  modified_base 8: mod_base = OTHER; note = 2'-O-methylcytidine-3'-phosphate
  modified_base 10: mod_base = OTHER; note = 2'-O-methylcytidine-3'-phosphate
  modified_base 14: mod_base = OTHER; note = 2'-O-methylcytidine-3'-phosphate
  misc_feature 1..19: note = RNA
  misc_feature 20..21: note = DNA
ttctgaacacatgcatggctt

SEQ ID NO: 1079 - DNA, 21 bp, synthetic construct
  source 1..21: mol_type = other DNA; note = Description of Artificial Sequence: Synthetic oligonucleotide; note = Description of Combined DNA/RNA Molecule: Synthetic oligonucleotide
  modified_base 1: mod_base = OTHER; note = 2'-O-methyluridine-3'-phosphate
  modified_base 3: mod_base = OTHER; note = 2'-O-methyluridine-3'-phosphate
  modified_base 4: mod_base = OTHER; note = 2'-O-methyluridine-3'-phosphate
  modified_base 5: mod_base = OTHER; note = 2'-O-methylcytidine-3'-phosphate
  modified_base 6: mod_base = OTHER; note = 2'-O-methylcytidine-3'-phosphate
  modified_base 8: mod_base = OTHER; note = 2'-O-methylcytidine-3'-phosphate
  modified_base 9: mod_base = OTHER; note = 2'-O-methylcytidine-3'-phosphate
  modified_base 11: mod_base = OTHER; note = 2'-O-methylcytidine-3'-phosphate
  modified_base 14: mod_base = OTHER; note = 2'-O-methylcytidine-3'-phosphate
  modified_base 15: mod_base = OTHER; note = 2'-O-methyluridine-3'-phosphate
  modified_base 17: mod_base = OTHER; note = 2'-O-methyluridine-3'-phosphate
  modified_base 18: mod_base = OTHER; note = 2'-O-methylcytidine-3'-phosphate
  misc_feature 1..19: note = RNA
  misc_feature 20..21: note = DNA
tattccaccacggctgtcatt

SEQ ID NO: 1080 - DNA, 21 bp, synthetic construct
  source 1..21: mol_type = other DNA; note = Description of Artificial Sequence: Synthetic oligonucleotide; note = Description of Combined DNA/RNA Molecule: Synthetic oligonucleotide
  modified_base 4: mod_base = OTHER; note = 2'-O-methylcytidine-3'-phosphate
  modified_base 18: mod_base = OTHER; note = 2'-O-methyluridine-3'-phosphate
  misc_feature 1..19: note = RNA
  misc_feature 20..21: note = DNA
tgacagccgtggtggaatatt

SEQ ID NO: 1081 - DNA, 21 bp, synthetic construct
  source 1..21: mol_type = other DNA; note = Description of Artificial Sequence: Synthetic oligonucleotide; note = Description of Combined DNA/RNA Molecule: Synthetic oligonucleotide
  modified_base 2: mod_base = OTHER; note = 2'-O-methyluridine-3'-phosphate
  modified_base 3: mod_base = OTHER; note = 2'-O-methylcytidine-3'-phosphate
  modified_base 5: mod_base = OTHER; note = 2'-O-methyluridine-3'-phosphate
  modified_base 6: mod_base = OTHER; note = 2'-O-methylcytidine-3'-phosphate
  modified_base 8: mod_base = OTHER; note = 2'-O-methylcytidine-3'-phosphate
  modified_base 9: mod_base = OTHER; note = 2'-O-methylcytidine-3'-phosphate
  modified_base 12: mod_base = OTHER; note = 2'-O-methyluridine-3'-phosphate
  modified_base 13: mod_base = OTHER; note = 2'-O-methylcytidine-3'-phosphate
  modified_base 14: mod_base = OTHER; note = 2'-O-methylcytidine-3'-phosphate
  modified_base 15: mod_base = OTHER; note = 2'-O-methylcytidine-3'-phosphate
  misc_feature 1..19: note = RNA
  misc_feature 20..21: note = DNA
gtcatcaccaatcccaaggtt

SEQ ID NO: 1082 - DNA, 21 bp, synthetic construct
  source 1..21: mol_type = other DNA; note = Description of Artificial Sequence: Synthetic oligonucleotide; note = Description of Combined DNA/RNA Molecule: Synthetic oligonucleotide
  misc_feature 1..19: note = RNA
  misc_feature 20..21: note = DNA
ccttgggattggtgatgactt

SEQ ID NO: 1083 - DNA, 21 bp, synthetic construct
  source 1..21: mol_type = other DNA; note = Description of Artificial Sequence: Synthetic oligonucleotide; note = Description of Combined DNA/RNA Molecule: Synthetic oligonucleotide
  modified_base 2: mod_base = OTHER; note = 2'-O-methyluridine-3'-phosphate
  modified_base 3: mod_base = OTHER; note = 2'-O-methylcytidine-3'-phosphate
  modified_base 4: mod_base = OTHER; note = 2'-O-methylcytidine-3'-phosphate
  modified_base 5: mod_base = OTHER; note = 2'-O-methyluridine-3'-phosphate
  modified_base 6: mod_base = OTHER; note = 2'-O-methylcytidine-3'-phosphate
  modified_base 7: mod_base = OTHER; note = 2'-O-methyluridine-3'-phosphate
  modified_base 10: mod_base = OTHER; note = 2'-O-methyluridine-3'-phosphate
  modified_base 13: mod_base = OTHER; note = 2'-O-methyluridine-3'-phosphate
  modified_base 14: mod_base = OTHER; note = 2'-O-methylcytidine-3'-phosphate
  modified_base 19: mod_base = OTHER; note = 2'-O-methyluridine-3'-phosphate
  misc_feature 1..19: note = RNA
  misc_feature 20..21: note = DNA
gtcctctgatggtcaaagttt

SEQ ID NO: 1084 - DNA, 21 bp, synthetic construct
  source 1..21: mol_type = other DNA; note = Description of Artificial Sequence: Synthetic oligonucleotide; note = Description of Combined DNA/RNA Molecule: Synthetic oligonucleotide
  modified_base 9: mod_base = OTHER; note = 2'-O-methylcytidine-3'-phosphate
  modified_base 12: mod_base = OTHER; note = 2'-O-methylcytidine-3'-phosphate
  misc_feature 1..19: note = RNA
  misc_feature 20..21: note = DNA
actttgaccatcagaggactt

SEQ ID NO: 1085 - DNA, 21 bp, synthetic construct
  source 1..21: mol_type = other DNA; note = Description of Artificial Sequence: Synthetic oligonucleotide; note = Description of Combined DNA/RNA Molecule: Synthetic oligonucleotide
  modified_base 3: mod_base = OTHER; note = 2'-O-methyluridine-3'-phosphate
  modified_base 6: mod_base = OTHER; note = 2'-O-methyluridine-3'-phosphate
  modified_base 7: mod_base = OTHER; note = 2'-O-methylcytidine-3'-phosphate
  modified_base 12: mod_base = OTHER; note = 2'-O-methyluridine-3'-phosphate
  modified_base 13: mod_base = OTHER; note = 2'-O-methyluridine-3'-phosphate
  modified_base 14: mod_base = OTHER; note = 2'-O-methylcytidine-3'-phosphate
  modified_base 15: mod_base = OTHER; note = 2'-O-methyluridine-3'-phosphate
  modified_base 19: mod_base = OTHER; note = 2'-O-methyluridine-3'-phosphate
  misc_feature 1..19: note = RNA
  misc_feature 20..21: note = DNA
gatggtcaaagttctagattt

SEQ ID NO: 1086 - DNA, 21 bp, synthetic construct
  source 1..21: mol_type = other DNA; note = Description of Artificial Sequence: Synthetic oligonucleotide; note = Description of Combined DNA/RNA Molecule: Synthetic oligonucleotide
  modified_base 4: mod_base = OTHER; note = 2'-O-methyluridine-3'-phosphate
  modified_base 16: mod_base = OTHER; note = 2'-O-methylcytidine-3'-phosphate
  misc_feature 1..19: note = RNA
  misc_feature 20..21: note = DNA
atctagaactttgaccatctt

SEQ ID NO: 1087 - DNA, 21 bp, synthetic construct
  source 1..21: mol_type = other DNA; note = Description of Artificial Sequence: Synthetic oligonucleotide; note = Description of Combined DNA/RNA Molecule: Synthetic oligonucleotide
  modified_base 2: mod_base = OTHER; note = 2'-O-methyluridine-3'-phosphate
  modified_base 4: mod_base = OTHER; note = 2'-O-methylcytidine-3'-phosphate
  modified_base 5: mod_base = OTHER; note = 2'-O-methyluridine-3'-phosphate
  modified_base 7: mod_base = OTHER; note = 2'-O-methyluridine-3'-phosphate
  modified_base 8: mod_base = OTHER; note = 2'-O-methylcytidine-3'-phosphate
  modified_base 9: mod_base = OTHER; note = 2'-O-methylcytidine-3'-phosphate
  modified_base 14: mod_base = OTHER; note = 2'-O-methylcytidine-3'-phosphate
  modified_base 17: mod_base = OTHER; note = 2'-O-methyluridine-3'-phosphate
  modified_base 18: mod_base = OTHER; note = 2'-O-methylcytidine-3'-phosphate
  modified_base 19: mod_base = OTHER; note = 2'-O-methylcytidine-3'-phosphate
  misc_feature 1..19: note = RNA
  misc_feature 20..21: note = DNA
atgctgtccgaggcagtcctt

SEQ ID NO: 1088 - DNA, 21 bp, synthetic construct
  source 1..21: mol_type = other DNA; note = Description of Artificial Sequence: Synthetic oligonucleotide; note = Description of Combined DNA/RNA Molecule: Synthetic oligonucleotide
  modified_base 14: mod_base = OTHER; note = 2'-O-methylcytidine-3'-phosphate
  modified_base 17: mod_base = OTHER; note = 2'-O-methylcytidine-3'-phosphate
  misc_feature 1..19: note = RNA
  misc_feature 20..21: note = DNA
ggactgcctcggacagcattt

SEQ ID NO: 1089 - DNA, 21 bp, synthetic construct
  source 1..21: mol_type = other DNA; note = Description of Artificial Sequence: Synthetic oligonucleotide; note = Description of Combined DNA/RNA Molecule: Synthetic oligonucleotide
  modified_base 1: mod_base = OTHER; note = 2'-O-methylcytidine-3'-phosphate
  modified_base 2: mod_base = OTHER; note = 2'-O-methylcytidine-3'-phosphate
  modified_base 4: mod_base = OTHER; note = 2'-O-methyluridine-3'-phosphate
  modified_base 6: mod_base = OTHER; note = 2'-O-methylcytidine-3'-phosphate
  modified_base 8: mod_base = OTHER; note = 2'-O-methyluridine-3'-phosphate
  modified_base 10: mod_base = OTHER; note = 2'-O-methyluridine-3'-phosphate
  modified_base 12: mod_base = OTHER; note = 2'-O-methyluridine-3'-phosphate
  modified_base 13: mod_base = OTHER; note = 2'-O-methyluridine-3'-phosphate
  modified_base 14: mod_base = OTHER; note = 2'-O-methylcytidine-3'-phosphate
  misc_feature 1..19: note = RNA
  misc_feature 20..21: note = DNA
ccgtgcatgtgttcagaaatt

SEQ ID NO: 1090 - DNA, 21 bp, synthetic construct
  source 1..21: mol_type = other DNA; note = Description of Artificial Sequence: Synthetic oligonucleotide; note = Description of Combined DNA/RNA Molecule: Synthetic oligonucleotide
  modified_base 9: mod_base = OTHER; note = 2'-O-methylcytidine-3'-phosphate
  modified_base 11: mod_base = OTHER; note = 2'-O-methylcytidine-3'-phosphate
  modified_base 15: mod_base = OTHER; note = 2'-O-methylcytidine-3'-phosphate
  misc_feature 1..19: note = RNA
  misc_feature 20..21: note = DNA
tttctgaacacatgcacggtt

SEQ ID NO: 1091 - DNA, 21 bp, synthetic construct
  source 1..21: mol_type = other DNA; note = Description of Artificial Sequence: Synthetic oligonucleotide; note = Description of Combined DNA/RNA Molecule: Synthetic oligonucleotide
  modified_base 3: mod_base = OTHER; note = 2'-O-methyluridine-3'-phosphate
  modified_base 4: mod_base = OTHER; note = 2'-O-methylcytidine-3'-phosphate
  modified_base 5: mod_base = OTHER; note = 2'-O-methyluridine-3'-phosphate
  modified_base 12: mod_base = OTHER; note = 2'-O-methylcytidine-3'-phosphate
  modified_base 13: mod_base = OTHER; note = 2'-O-methyluridine-3'-phosphate
  modified_base 15: mod_base = OTHER; note = 2'-O-methylcytidine-3'-phosphate
  modified_base 17: mod_base = OTHER; note = 2'-O-methyluridine-3'-phosphate
  misc_feature 1..19: note = RNA
  misc_feature 20..21: note = DNA
agtctggagagctgcatggtt

SEQ ID NO: 1092 - DNA, 21 bp, synthetic construct
  source 1..21: mol_type = other DNA; note = Description of Artificial Sequence: Synthetic oligonucleotide; note = Description of Combined DNA/RNA Molecule: Synthetic oligonucleotide
  modified_base 2: mod_base = OTHER; note = 2'-O-methylcytidine-3'-phosphate
  modified_base 6: mod_base = OTHER; note = 2'-O-methylcytidine-3'-phosphate
  modified_base 14: mod_base = OTHER; note = 2'-O-methylcytidine-3'-phosphate
  misc_feature 1..19: note = RNA
  misc_feature 20..21: note = DNA
ccatgcagctctccagacttt

SEQ ID NO: 1093 - DNA, 21 bp, synthetic construct
  source 1..21: mol_type = other DNA; note = Description of Artificial Sequence: Synthetic oligonucleotide; note = Description of Combined DNA/RNA Molecule: Synthetic oligonucleotide
  modified_base 1: mod_base = OTHER; note = 2'-O-methylcytidine-3'-phosphate
  modified_base 3: mod_base = OTHER; note = 2'-O-methyluridine-3'-phosphate
  modified_base 7: mod_base = OTHER; note = 2'-O-methylcytidine-3'-phosphate
  modified_base 8: mod_base = OTHER; note = 2'-O-methyluridine-3'-phosphate
  modified_base 9: mod_base = OTHER; note = 2'-O-methylcytidine-3'-phosphate
  modified_base 11: mod_base = OTHER; note = 2'-O-methylcytidine-3'-phosphate
  modified_base 14: mod_base = OTHER; note = 2'-O-methylcytidine-3'-phosphate
  modified_base 15: mod_base = OTHER; note = 2'-O-methyluridine-3'-phosphate
  misc_feature 1..19: note = RNA
  misc_feature 20..21: note = DNA
catgggctcacaactgaggtt

SEQ ID NO: 1094 - DNA, 21 bp, synthetic construct
  source 1..21: mol_type = other DNA; note = Description of Artificial Sequence: Synthetic oligonucleotide; note = Description of Combined DNA/RNA Molecule: Synthetic oligonucleotide
  modified_base 4: mod_base = OTHER; note = 2'-O-methylcytidine-3'-phosphate
  modified_base 16: mod_base = OTHER; note = 2'-O-methylcytidine-3'-phosphate
  misc_feature 1..19: note = RNA
  misc_feature 20..21: note = DNA
cctcagttgtgagcccatgtt

SEQ ID NO: 1095 - DNA, 21 bp, synthetic construct
  source 1..21: mol_type = other DNA; note = Description of Artificial Sequence: Synthetic oligonucleotide; note = Description of Combined DNA/RNA Molecule: Synthetic oligonucleotide
  modified_base 1: mod_base = OTHER; note = 2'-O-methyluridine-3'-phosphate
  modified_base 2: mod_base = OTHER; note = 2'-O-methylcytidine-3'-phosphate
  modified_base 3: mod_base = OTHER; note = 2'-O-methyluridine-3'-phosphate
  modified_base 4: mod_base = OTHER; note = 2'-O-methylcytidine-3'-phosphate
  modified_base 6: mod_base = OTHER; note = 2'-O-methyluridine-3'-phosphate
  modified_base 7: mod_base = OTHER; note = 2'-O-methylcytidine-3'-phosphate
  modified_base 9: mod_base = OTHER; note = 2'-O-methyluridine-3'-phosphate
  modified_base 10: mod_base = OTHER; note = 2'-O-methylcytidine-3'-phosphate
  modified_base 11: mod_base = OTHER; note = 2'-O-methyluridine-3'-phosphate
  modified_base 13: mod_base = OTHER; note = 2'-O-methylcytidine-3'-phosphate
  modified_base 14: mod_base = OTHER; note = 2'-O-methyluridine-3'-phosphate
  modified_base 15: mod_base = OTHER; note = 2'-O-methylcytidine-3'-phosphate
  modified_base 16: mod_base = OTHER; note = 2'-O-methylcytidine-3'-phosphate
  modified_base 17: mod_base = OTHER; note = 2'-O-methyluridine-3'-phosphate
  modified_base 18: mod_base = OTHER; note = 2'-O-methylcytidine-3'-phosphate
  modified_base 19: mod_base = OTHER; note = 2'-O-methylcytidine-3'-phosphate
  misc_feature 1..19: note = RNA
  misc_feature 20..21: note = DNA
tctcatcgtctgctcctcctt

SEQ ID NO: 1096 - DNA, 21 bp, synthetic construct
  source 1..21: mol_type = other DNA; note = Description of Artificial Sequence: Synthetic oligonucleotide; note = Description of Combined DNA/RNA Molecule: Synthetic oligonucleotide
  modified_base 8: mod_base = OTHER; note = 2'-O-methylcytidine-3'-phosphate
  misc_feature 1..19: note = RNA
  misc_feature 20..21: note = DNA
ggaggagcagacgatgagatt

SEQ ID NO: 1097 - DNA, 21 bp, synthetic construct
  source 1..21: mol_type = other DNA; note = Description of Artificial Sequence: Synthetic oligonucleotide; note = Description of Combined DNA/RNA Molecule: Synthetic oligonucleotide
  modified_base 1: mod_base = OTHER; note = 2'-O-methylcytidine-3'-phosphate
  modified_base 2: mod_base = OTHER; note = 2'-O-methylcytidine-3'-phosphate
  modified_base 3: mod_base = OTHER; note = 2'-O-methylcytidine-3'-phosphate
  modified_base 4: mod_base = OTHER; note = 2'-O-methylcytidine-3'-phosphate
  modified_base 6: mod_base = OTHER; note = 2'-O-methyluridine-3'-phosphate
  modified_base 7: mod_base = OTHER; note = 2'-O-methyluridine-3'-phosphate
  modified_base 8: mod_base = OTHER; note = 2'-O-methylcytidine-3'-phosphate
  modified_base 9: mod_base = OTHER; note = 2'-O-methylcytidine-3'-phosphate
  modified_base 11: mod_base = OTHER; note = 2'-O-methyluridine-3'-phosphate
  modified_base 15: mod_base = OTHER; note = 2'-O-methylcytidine-3'-phosphate
  modified_base 17: mod_base = OTHER; note = 2'-O-methyluridine-3'-phosphate
  modified_base 19: mod_base = OTHER; note = 2'-O-methylcytidine-3'-phosphate
  misc_feature 1..19: note = RNA
  misc_feature 20..21: note = DNA
ccccattccatgagcatgctt

SEQ ID NO: 1098 - DNA, 21 bp, synthetic construct
  source 1..21: mol_type = other DNA; note = Description of Artificial Sequence: Synthetic oligonucleotide; note = Description of Combined DNA/RNA Molecule: Synthetic oligonucleotide
  modified_base 2: mod_base = OTHER; note = 2'-O-methylcytidine-3'-phosphate
  modified_base 8: mod_base = OTHER; note = 2'-O-methylcytidine-3'-phosphate
  misc_feature 1..19: note = RNA
  misc_feature 20..21: note = DNA
gcatgctcatggaatggggtt

SEQ ID NO: 1099 - DNA, 21 bp, synthetic construct
  source 1..21: mol_type = other DNA; note = Description of Artificial Sequence: Synthetic oligonucleotide; note = Description of Combined DNA/RNA Molecule: Synthetic oligonucleotide
  modified_base 2: mod_base = OTHER; note = 2'-O-methylcytidine-3'-phosphate
  modified_base 3: mod_base = OTHER; note = 2'-O-methylcytidine-3'-phosphate
  modified_base 4: mod_base = OTHER; note = 2'-O-methylcytidine-3'-phosphate
  modified_base 5: mod_base = OTHER; note = 2'-O-methylcytidine-3'-phosphate
  modified_base 6: mod_base = OTHER; note = 2'-O-methyluridine-3'-phosphate
  modified_base 8: mod_base = OTHER; note = 2'-O-methylcytidine-3'-phosphate
  modified_base 9: mod_base = OTHER; note = 2'-O-methyluridine-3'-phosphate
  modified_base 10: mod_base = OTHER; note = 2'-O-methylcytidine-3'-phosphate
  modified_base 11: mod_base = OTHER; note = 2'-O-methylcytidine-3'-phosphate
  modified_base 12: mod_base = OTHER; note = 2'-O-methyluridine-3'-phosphate
  modified_base 14: mod_base = OTHER; note = 2'-O-methyluridine-3'-phosphate
  modified_base 15: mod_base = OTHER; note = 2'-O-methyluridine-3'-phosphate
  modified_base 16: mod_base = OTHER; note = 2'-O-methylcytidine-3'-phosphate
  modified_base 17: mod_base = OTHER; note = 2'-O-methylcytidine-3'-phosphate
  modified_base 19: mod_base = OTHER; note = 2'-O-methylcytidine-3'-phosphate
  misc_feature 1..19: note = RNA
  misc_feature 20..21: note = DNA
gcccctactcctattccactt

SEQ ID NO: 1100 - DNA, 21 bp, synthetic construct
  source 1..21: mol_type = other DNA; note = Description of Artificial Sequence: Synthetic oligonucleotide; note = Description of Combined DNA/RNA Molecule: Synthetic oligonucleotide
  modified_base 7: mod_base = OTHER; note = 2'-O-methyluridine-3'-phosphate
  modified_base 13: mod_base = OTHER; note = 2'-O-methyluridine-3'-phosphate
  misc_feature 1..19: note = RNA
  misc_feature 20..21: note = DNA
gtggaataggagtaggggctt

SEQ ID NO: 1101 - DNA, 21 bp, synthetic construct
  source 1..21: mol_type = other DNA; note = Description of Artificial Sequence: Synthetic oligonucleotide; note = Description of Combined DNA/RNA Molecule: Synthetic oligonucleotide
  modified_base 1: mod_base = OTHER; note = 2'-O-methylcytidine-3'-phosphate
  modified_base 2: mod_base = OTHER; note = 2'-O-methyluridine-3'-phosphate
  modified_base 4: mod_base = OTHER; note = 2'-O-methyluridine-3'-phosphate
  modified_base 5: mod_base = OTHER; note = 2'-O-methyluridine-3'-phosphate
  modified_base 6: mod_base = OTHER; note = 2'-O-methylcytidine-3'-phosphate
  modified_base 7: mod_base = OTHER; note = 2'-O-methylcytidine-3'-phosphate
  modified_base 9: mod_base = OTHER; note = 2'-O-methylcytidine-3'-phosphate
  modified_base 10: mod_base = OTHER; note = 2'-O-methylcytidine-3'-phosphate
  modified_base 12: mod_base = OTHER; note = 2'-O-methylcytidine-3'-phosphate
  modified_base 15: mod_base = OTHER; note = 2'-O-methylcytidine-3'-phosphate
  modified_base 16: mod_base = OTHER; note = 2'-O-methyluridine-3'-phosphate
  modified_base 18: mod_base = OTHER; note = 2'-O-methyluridine-3'-phosphate
  modified_base 19: mod_base = OTHER; note = 2'-O-methylcytidine-3'-phosphate
  misc_feature 1..19: note = RNA
  misc_feature 20..21: note = DNA
ctattccaccacggctgtctt

SEQ ID NO: 1102 - DNA, 21 bp, synthetic construct
  source 1..21: mol_type = other DNA; note = Description of Artificial Sequence: Synthetic oligonucleotide; note = Description of Combined DNA/RNA Molecule: Synthetic oligonucleotide
  modified_base 3: mod_base = OTHER; note = 2'-O-methylcytidine-3'-phosphate
  modified_base 17: mod_base = OTHER; note = 2'-O-methyluridine-3'-phosphate
  misc_feature 1..19: note = RNA
  misc_feature 20..21: note = DNA
gacagccgtggtggaatagtt

SEQ ID NO: 1103 - DNA, 21 bp, synthetic construct
  source 1..21: mol_type = other DNA; note = Description of Artificial Sequence: Synthetic oligonucleotide; note = Description of Combined DNA/RNA Molecule: Synthetic oligonucleotide
  modified_base 1: mod_base = OTHER; note = 2'-O-methylcytidine-3'-phosphate
  modified_base 3: mod_base = OTHER; note = 2'-O-methylcytidine-3'-phosphate
  modified_base 6: mod_base = OTHER; note = 2'-O-methylcytidine-3'-phosphate
  modified_base 7: mod_base = OTHER; note = 2'-O-methyluridine-3'-phosphate
  modified_base 9: mod_base = OTHER; note = 2'-O-methyluridine-3'-phosphate
  modified_base 10: mod_base = OTHER; note = 2'-O-methylcytidine-3'-phosphate
  modified_base 12: mod_base = OTHER; note = 2'-O-methyluridine-3'-phosphate
  modified_base 13: mod_base = OTHER; note = 2'-O-methylcytidine-3'-phosphate
  modified_base 15: mod_base = OTHER; note = 2'-O-methylcytidine-3'-phosphate
  modified_base 16: mod_base = OTHER; note = 2'-O-methylcytidine-3'-phosphate
  modified_base 19: mod_base = OTHER; note = 2'-O-methyluridine-3'-phosphate
  misc_feature 1..19: note = RNA
  misc_feature 20..21: note = DNA
cacggctgtcgtcaccaattt

SEQ ID NO: 1104 - DNA, 21 bp, synthetic construct
  source 1..21: mol_type = other DNA; note = Description of Artificial Sequence: Synthetic oligonucleotide; note = Description of Combined DNA/RNA Molecule: Synthetic oligonucleotide
  modified_base 12: mod_base = OTHER; note = 2'-O-methylcytidine-3'-phosphate
  misc_feature 1..19: note = RNA
  misc_feature 20..21: note = DNA
attggtgacgacagccgtgtt

SEQ ID NO: 1105 - DNA, 21 bp, synthetic construct
  source 1..21: mol_type = other DNA; note = Description of Artificial Sequence: Synthetic oligonucleotide; note = Description of Combined DNA/RNA Molecule: Synthetic oligonucleotide
  modified_base 5: mod_base = OTHER; note = 2'-O-methylcytidine-3'-phosphate
  modified_base 12: mod_base = OTHER; note = 2'-O-methyluridine-3'-phosphate
  modified_base 17: mod_base = OTHER; note = 2'-O-methyluridine-3'-phosphate
  modified_base 18: mod_base = OTHER; note = 2'-O-methyluridine-3'-phosphate
  modified_base 19: mod_base = OTHER; note = 2'-O-methyluridine-3'-phosphate
  misc_feature 1..19: note = RNA
  misc_feature 20..21: note = DNA
aggacgagggatgggattttt

SEQ ID NO: 1106 - DNA, 21 bp, synthetic construct
  source 1..21: mol_type = other DNA; note = Description of Artificial Sequence: Synthetic oligonucleotide; note = Description of Combined DNA/RNA Molecule: Synthetic oligonucleotide
  modified_base 7: mod_base = OTHER; note = 2'-O-methylcytidine-3'-phosphate
  misc_feature 1..19: note = RNA
  misc_feature 20..21: note = DNA
aaatcccatccctcgtccttt

SEQ ID NO: 1107 - DNA, 21 bp, synthetic construct
  source 1..21: mol_type = other DNA; note = Description of Artificial Sequence: Synthetic oligonucleotide; note = Description of Combined DNA/RNA Molecule: Synthetic oligonucleotide
  modified_base 1: mod_base = OTHER; note = 2'-O-methyluridine-3'-phosphate
  modified_base 2: mod_base = OTHER; note = 2'-O-methylcytidine-3'-phosphate
  modified_base 4: mod_base = OTHER; note = 2'-O-methylcytidine-3'-phosphate
  modified_base 5: mod_base = OTHER; note = 2'-O-methylcytidine-3'-phosphate
  modified_base 6: mod_base = OTHER; note = 2'-O-methyluridine-3'-phosphate
  modified_base 7: mod_base = OTHER; note = 2'-O-methylcytidine-3'-phosphate
  modified_base 9: mod_base = OTHER; note = 2'-O-methyluridine-3'-phosphate
  modified_base 11: mod_base = OTHER; note = 2'-O-methyluridine-3'-phosphate
  modified_base 13: mod_base = OTHER; note = 2'-O-methylcytidine-3'-phosphate
  modified_base 14: mod_base = OTHER; note = 2'-O-methyluridine-3'-phosphate
  modified_base 16: mod_base = OTHER; note = 2'-O-methyluridine-3'-phosphate
  modified_base 18: mod_base = OTHER; note = 2'-O-methyluridine-3'-phosphate
  modified_base 19: mod_base = OTHER; note = 2'-O-methyluridine-3'-phosphate
  misc_feature 1..19: note = RNA
  misc_feature 20..21: note = DNA
tcacctcatatgctatgtttt

SEQ ID NO: 1108 - DNA, 21 bp, synthetic construct
  source 1..21: mol_type = other DNA; note = Description of Artificial Sequence: Synthetic oligonucleotide; note = Description of Combined DNA/RNA Molecule: Synthetic oligonucleotide
  modified_base 3: mod_base = OTHER; note = 2'-O-methylcytidine-3'-phosphate
  modified_base 5: mod_base = OTHER; note = 2'-O-methyluridine-3'-phosphate
  modified_base 8: mod_base = OTHER; note = 2'-O-methylcytidine-3'-phosphate
  modified_base 10: mod_base = OTHER; note = 2'-O-methyluridine-3'-phosphate
  misc_feature 1..19: note = RNA
  misc_feature 20..21: note = DNA
aacatagcatatgaggtgatt

SEQ ID NO: 1109 - DNA, 21 bp, synthetic construct
  source 1..21: mol_type = other DNA; note = Description of Artificial Sequence: Synthetic oligonucleotide; note = Description of Combined DNA/RNA Molecule: Synthetic oligonucleotide
  modified_base 1: mod_base = OTHER; note = 2'-O-methylcytidine-3'-phosphate
  modified_base 2: mod_base = OTHER; note = 2'-O-methylcytidine-3'-phosphate
  modified_base 3: mod_base = OTHER; note = 2'-O-methyluridine-3'-phosphate
  modified_base 4: mod_base = OTHER; note = 2'-O-methylcytidine-3'-phosphate
  modified_base 6: mod_base = OTHER; note = 2'-O-methyluridine-3'-phosphate
  modified_base 8: mod_base = OTHER; note = 2'-O-methyluridine-3'-phosphate
  modified_base 10: mod_base = OTHER; note = 2'-O-methylcytidine-3'-phosphate
  modified_base 11: mod_base = OTHER; note = 2'-O-methyluridine-3'-phosphate
  modified_base 13: mod_base = OTHER; note = 2'-O-methyluridine-3'-phosphate
  modified_base 15: mod_base = OTHER; note = 2'-O-methyluridine-3'-phosphate
  modified_base 16: mod_base = OTHER; note = 2'-O-methyluridine-3'-phosphate
  misc_feature 1..19: note = RNA
  misc_feature 20..21: note = DNA
cctcatatgctatgttagatt

SEQ ID NO: 1110 - DNA, 21 bp, synthetic construct
  source 1..21: mol_type = other DNA; note = Description of Artificial Sequence: Synthetic oligonucleotide; note = Description of Combined DNA/RNA Molecule: Synthetic oligonucleotide
  modified_base 3: mod_base = OTHER; note = 2'-O-methyluridine-3'-phosphate
  modified_base 6: mod_base = OTHER; note = 2'-O-methylcytidine-3'-phosphate
  modified_base 8: mod_base = OTHER; note = 2'-O-methyluridine-3'-phosphate
  modified_base 11: mod_base = OTHER; note = 2'-O-methylcytidine-3'-phosphate
  modified_base 13: mod_base = OTHER; note = 2'-O-methyluridine-3'-phosphate
  misc_feature 1..19: note = RNA
  misc_feature 20..21: note = DNA
tctaacatagcatatgaggtt

SEQ ID NO: 1111 - DNA, 21 bp, synthetic construct
  source 1..21: mol_type = other DNA; note = Description of Artificial Sequence: Synthetic oligonucleotide; note = Description of Combined DNA/RNA Molecule: Synthetic oligonucleotide
  modified_base 2: mod_base = OTHER; note = 2'-O-methyluridine-3'-phosphate
  modified_base 4: mod_base = OTHER; note = 2'-O-methyluridine-3'-phosphate
  modified_base 5: mod_base = OTHER; note = 2'-O-methyluridine-3'-phosphate
  modified_base 11: mod_base = OTHER; note = 2'-O-methyluridine-3'-phosphate
  modified_base 12: mod_base = OTHER; note = 2'-O-methylcytidine-3'-phosphate
  modified_base 13: mod_base = OTHER; note = 2'-O-methylcytidine-3'-phosphate
  modified_base 17: mod_base = OTHER; note = 2'-O-methylcytidine-3'-phosphate
  misc_feature 1..19: note = RNA
  misc_feature 20..21: note = DNA
atgttagaagtccaggcagtt

SEQ ID NO: 1112 - DNA, 21 bp, synthetic construct
  source 1..21: mol_type = other DNA; note = Description of Artificial Sequence: Synthetic oligonucleotide; note = Description of Combined DNA/RNA Molecule: Synthetic oligonucleotide
  modified_base 14: mod_base = OTHER; note = 2'-O-methyluridine-3'-phosphate
  modified_base 17: mod_base = OTHER; note = 2'-O-methylcytidine-3'-phosphate
  misc_feature 1..19: note = RNA
  misc_feature 20..21: note = DNA
ctgcctggacttctaacattt

SEQ ID NO: 1113 - DNA, 21 bp, synthetic construct
  source 1..21: mol_type = other DNA; note = Description of Artificial Sequence: Synthetic oligonucleotide; note = Description of Combined DNA/RNA Molecule: Synthetic oligonucleotide
  modified_base 1: mod_base = OTHER; note = 2'-O-methyluridine-3'-phosphate
  modified_base 2: mod_base = OTHER; note = 2'-O-methylcytidine-3'-phosphate
  modified_base 3: mod_base = OTHER; note = 2'-O-methyluridine-3'-phosphate
  modified_base 8: mod_base = OTHER; note = 2'-O-methylcytidine-3'-phosphate
  modified_base 9: mod_base = OTHER; note = 2'-O-methyluridine-3'-phosphate
  modified_base 12: mod_base = OTHER; note = 2'-O-methylcytidine-3'-phosphate
  modified_base 13: mod_base = OTHER; note = 2'-O-methylcytidine-3'-phosphate
  modified_base 14: mod_base = OTHER; note = 2'-O-methylcytidine-3'-phosphate
  modified_base 15: mod_base = OTHER; note = 2'-O-methyluridine-3'-phosphate
  modified_base 17: mod_base = OTHER; note = 2'-O-methylcytidine-3'-phosphate
  misc_feature 1..19: note = RNA
  misc_feature 20..21: note = DNA
tctgaggctggccctacggtt

SEQ ID NO: 1114 - DNA, 21 bp, synthetic construct
  source 1..21: mol_type = other DNA; note = Description of Artificial Sequence: Synthetic oligonucleotide; note = Description of Combined DNA/RNA Molecule: Synthetic oligonucleotide
  modified_base 4: mod_base = OTHER; note = 2'-O-methyluridine-3'-phosphate
  modified_base 10: mod_base = OTHER; note = 2'-O-methylcytidine-3'-phosphate
  modified_base 16: mod_base = OTHER; note = 2'-O-methylcytidine-3'-phosphate
  misc_feature 1..19: note = RNA
  misc_feature 20..21: note = DNA
ccgtagggccagcctcagatt

SEQ ID NO: 1115 - DNA, 21 bp, synthetic construct
  source 1..21: mol_type = other DNA; note = Description of Artificial Sequence: Synthetic oligonucleotide; note = Description of Combined DNA/RNA Molecule: Synthetic oligonucleotide
  modified_base 3: mod_base = OTHER; note = 2'-O-methylcytidine-3'-phosphate
  modified_base 4: mod_base = OTHER; note = 2'-O-methylcytidine-3'-phosphate
  modified_base 5: mod_base = OTHER; note = 2'-O-methylcytidine-3'-phosphate
  modified_base 6: mod_base = OTHER; note = 2'-O-methyluridine-3'-phosphate
  modified_base 8: mod_base = OTHER; note = 2'-O-methylcytidine-3'-phosphate
  modified_base 12: mod_base = OTHER; note = 2'-O-methylcytidine-3'-phosphate
  modified_base 14: mod_base = OTHER; note = 2'-O-methylcytidine-3'-phosphate
  modified_base 15: mod_base = OTHER; note = 2'-O-methylcytidine-3'-phosphate
  modified_base 18: mod_base = OTHER; note = 2'-O-methyluridine-3'-phosphate
  misc_feature 1..19: note = RNA
  misc_feature 20..21: note = DNA
ggccctacgggcaccggtgtt

SEQ ID NO: 1116 - DNA, 21 bp, synthetic construct
  source 1..21: mol_type = other DNA; note = Description of Artificial Sequence: Synthetic oligonucleotide; note = Description of Combined DNA/RNA Molecule: Synthetic oligonucleotide
  modified_base 1: mod_base = OTHER; note = 2'-O-methylcytidine-3'-phosphate
  modified_base 13: mod_base = OTHER; note = 2'-O-methyluridine-3'-phosphate
  misc_feature 1..19: note = RNA
  misc_feature 20..21: note = DNA
caccggtgcccgtagggcctt

SEQ ID NO: 1117 - DNA, 21 bp, synthetic construct
  source 1..21: mol_type = other DNA; note = Description of Artificial Sequence: Synthetic oligonucleotide; note = Description of Combined DNA/RNA Molecule: Synthetic oligonucleotide
  modified_base 4: mod_base = OTHER; note = 2'-O-methylcytidine-3'-phosphate
  modified_base 6: mod_base = OTHER; note = 2'-O-methylcytidine-3'-phosphate
  modified_base 7: mod_base = OTHER; note = 2'-O-methylcytidine-3'-phosphate
  modified_base 10: mod_base = OTHER; note = 2'-O-methyluridine-3'-phosphate
  modified_base 14: mod_base = OTHER; note = 2'-O-methyluridine-3'-phosphate
  modified_base 15: mod_base = OTHER; note = 2'-O-methylcytidine-3'-phosphate
  modified_base 16: mod_base = OTHER; note = 2'-O-methylcytidine-3'-phosphate
  misc_feature 1..19: note = RNA
  misc_feature 20..21: note = DNA
gggcaccggtgaatccaagtt

SEQ ID NO: 1118 - DNA, 21 bp, synthetic construct
  source 1..21: mol_type = other DNA; note = Description of Artificial Sequence: Synthetic oligonucleotide; note = Description of Combined DNA/RNA Molecule: Synthetic oligonucleotide
  modified_base 9: mod_base = OTHER; note = 2'-O-methylcytidine-3'-phosphate
  misc_feature 1..19: note = RNA
  misc_feature 20..21: note = DNA
cttggattcaccggtgccctt

SEQ ID NO: 1119 - DNA, 21 bp, synthetic construct
  source 1..21: mol_type = other DNA; note = Description of Artificial Sequence: Synthetic oligonucleotide; note = Description of Combined DNA/RNA Molecule: Synthetic oligonucleotide
  modified_base 1: mod_base = OTHER; note = 2'-O-methylcytidine-3'-phosphate
  modified_base 2: mod_base = OTHER; note = 2'-O-methylcytidine-3'-phosphate
  modified_base 4: mod_base = OTHER; note = 2'-O-methyluridine-3'-phosphate
  modified_base 6: mod_base = OTHER; note = 2'-O-methylcytidine-3'-phosphate
  modified_base 8: mod_base = OTHER; note = 2'-O-methyluridine-3'-phosphate
  modified_base 10: mod_base = OTHER; note = 2'-O-methyluridine-3'-phosphate
  modified_base 12: mod_base = OTHER; note = 2'-O-methyluridine-3'-phosphate
  modified_base 13: mod_base = OTHER; note = 2'-O-methyluridine-3'-phosphate
  modified_base 14: mod_base = OTHER; note = 2'-O-methylcytidine-3'-phosphate
  misc_feature 1..19: note = RNA
  misc_feature 20..21: note = DNA
ccatgcatgtgttcagaaatt

SEQ ID NO: 1120 - DNA, 21 bp, synthetic construct
  source 1..21: mol_type = other DNA; note = Description of Artificial Sequence: Synthetic oligonucleotide; note = Description of Combined DNA/RNA Molecule: Synthetic oligonucleotide
  modified_base 9: mod_base = OTHER; note = 2'-O-methylcytidine-3'-phosphate
  modified_base 11: mod_base = OTHER; note = 2'-O-methylcytidine-3'-phosphate
  modified_base 15: mod_base = OTHER; note = 2'-O-methylcytidine-3'-phosphate
  misc_feature 1..19: note = RNA
  misc_feature 20..21: note = DNA
tttctgaacacatgcatggtt

SEQ ID NO: 1121 - RNA, 19 nt, synthetic construct
  source 1..19: mol_type = other RNA; note = Description of Artificial Sequence: Synthetic oligonucleotide
gtcctctgatggtcaaagt

SEQ ID NO: 1122 - RNA, 19 nt, synthetic construct
  source 1..19: mol_type = other RNA; note = Description of Artificial Sequence: Synthetic oligonucleotide
actttgaccatcagaggac

SEQ ID NO: 1123 - RNA, 19 nt, synthetic construct
  source 1..19: mol_type = other RNA; note = Description of Artificial Sequence: Synthetic oligonucleotide
ttcttgctctataaaccgt

SEQ ID NO: 1124 - RNA, 19 nt, synthetic construct
  source 1..19: mol_type = other RNA; note = Description of Artificial Sequence: Synthetic oligonucleotide
acggtttatagagcaagaa

SEQ ID NO: 1125 - RNA, 19 nt, synthetic construct
  source 1..19: mol_type = other RNA; note = Description of Artificial Sequence: Synthetic oligonucleotide
ctctataaaccgtgttagc

SEQ ID NO: 1126 - RNA, 19 nt, synthetic construct
  source 1..19: mol_type = other RNA; note = Description of Artificial Sequence: Synthetic oligonucleotide
gctaacacggtttatagag

SEQ ID NO: 1127 - RNA, 19 nt, synthetic construct
  source 1..19: mol_type = other RNA; note = Description of Artificial Sequence: Synthetic oligonucleotide
tcgccactacaccatcgca

SEQ ID NO: 1128 - RNA, 19 nt, synthetic construct
  source 1..19: mol_type = other RNA; note = Description of Artificial Sequence: Synthetic oligonucleotide
tgcgatggtgtagtggcga

SEQ ID NO: 1129 - RNA, 19 nt, synthetic construct
  source 1..19: mol_type = other RNA; note = Description of Artificial Sequence: Synthetic oligonucleotide
tcttgctctataaaccgtg

SEQ ID NO: 1130 - RNA, 19 nt, synthetic construct
  source 1..19: mol_type = other RNA; note = Description of Artificial Sequence: Synthetic oligonucleotide
cacggtttatagagcaaga

SEQ ID NO: 1131 - RNA, 19 nt, synthetic construct
  source 1..19: mol_type = other RNA; note = Description of Artificial Sequence: Synthetic oligonucleotide
tgctctataaaccgtgtta

SEQ ID NO: 1132 - RNA, 19 nt, synthetic construct
  source 1..19: mol_type = other RNA; note = Description of Artificial Sequence: Synthetic oligonucleotide
taacacggtttatagagca

SEQ ID NO: 1133 - RNA, 19 nt, synthetic construct
  source 1..19: mol_type = other RNA; note = Description of Artificial Sequence: Synthetic oligonucleotide
cagtgttcttgctctataa

SEQ ID NO: 1134 - RNA, 19 nt, synthetic construct
  source 1..19: mol_type = other RNA; note = Description of Artificial Sequence: Synthetic oligonucleotide
ttatagagcaagaacactg

SEQ ID NO: 1135 - RNA, 19 nt, synthetic construct
  source 1..19: mol_type = other RNA; note = Description of Artificial Sequence: Synthetic oligonucleotide
gctctataaaccgtgttag

SEQ ID NO: 1136 - RNA, 19 nt, synthetic construct
  source 1..19: mol_type = other RNA; note = Description of Artificial Sequence: Synthetic oligonucleotide
ctaacacggtttatagagc

SEQ ID NO: 1137 - RNA, 19 nt, synthetic construct
  source 1..19: mol_type = other RNA; note = Description of Artificial Sequence: Synthetic oligonucleotide
cctggatgctgtccgaggc

SEQ ID NO: 1138 - RNA, 19 nt, synthetic construct
  source 1..19: mol_type = other RNA; note = Description of Artificial Sequence: Synthetic oligonucleotide
gcctcggacagcatccagg

SEQ ID NO: 1139 - RNA, 19 nt, synthetic construct
  source 1..19: mol_type = other RNA; note = Description of Artificial Sequence: Synthetic oligonucleotide
tctgatggtcaaagtcctg

SEQ ID NO: 1140 - RNA, 19 nt, synthetic construct
  source 1..19: mol_type = other RNA; note = Description of Artificial Sequence: Synthetic oligonucleotide
caggactttgaccatcaga

SEQ ID NO: 1141 - RNA, 19 nt, synthetic construct
  source 1..19: mol_type = other RNA; note = Description of Artificial Sequence: Synthetic oligonucleotide
ctggagagctgcacgggct

SEQ ID NO: 1142 - RNA, 19 nt, synthetic construct
  source 1..19: mol_type = other RNA; note = Description of Artificial Sequence: Synthetic oligonucleotide
agcccgtgcagctctccag

SEQ ID NO: 1143 - RNA, 19 nt, synthetic construct
  source 1..19: mol_type = other RNA; note = Description of Artificial Sequence: Synthetic oligonucleotide
tctataaaccgtgttagca

SEQ ID NO: 1144 - RNA, 19 nt, synthetic construct
  source 1..19: mol_type = other RNA; note = Description of Artificial Sequence: Synthetic oligonucleotide
tgctaacacggtttataga

SEQ ID NO: 1145 - RNA, 19 nt, synthetic construct
  source 1..19: mol_type = other RNA; note = Description of Artificial Sequence: Synthetic oligonucleotide
aacagtgttcttgctctat

SEQ ID NO: 1146 - RNA, 19 nt, synthetic construct
  source 1..19: mol_type = other RNA; note = Description of Artificial Sequence: Synthetic oligonucleotide
atagagcaagaacactgtt

SEQ ID NO: 1147 - RNA, 19 nt, synthetic construct
  source 1..19: mol_type = other RNA; note = Description of Artificial Sequence: Synthetic oligonucleotide
ctctgatggtcaaagtcct

SEQ ID NO: 1148 - RNA, 19 nt, synthetic construct
  source 1..19: mol_type = other RNA; note = Description of Artificial Sequence: Synthetic oligonucleotide
aggactttgaccatcagag

SEQ ID NO: 1149 - RNA, 19 nt, synthetic construct
  source 1..19: mol_type = other RNA; note = Description of Artificial Sequence: Synthetic oligonucleotide
tgctgtccgaggcagccct

SEQ ID NO: 1150 - RNA, 19 nt, synthetic construct
  source 1..19: mol_type = other RNA; note = Description of Artificial Sequence: Synthetic oligonucleotide
agggctgcctcggacagca

SEQ ID NO: 1151 - RNA, 19 nt, synthetic construct
  source 1..19: mol_type = other RNA; note = Description of Artificial Sequence: Synthetic oligonucleotide
gtctggagagctgcacggg

SEQ ID NO: 1152 - RNA, 19 nt, synthetic construct
  source 1..19: mol_type = other RNA; note = Description of Artificial Sequence: Synthetic oligonucleotide
cccgtgcagctctccagac

SEQ ID NO: 1153 - RNA, 19 nt, synthetic construct
  source 1..19: mol_type = other RNA; note = Description of Artificial Sequence: Synthetic oligonucleotide
acagtgttcttgctctata

SEQ ID NO: 1154 - RNA, 19 nt, synthetic construct
  source 1..19: mol_type = other RNA; note = Description of Artificial Sequence: Synthetic oligonucleotide
tatagagcaagaacactgt

SEQ ID NO: 1155 - RNA, 19 nt, synthetic construct
  source 1..19: mol_type = other RNA; note = Description of Artificial Sequence: Synthetic oligonucleotide
cctctgatggtcaaagtcc

SEQ ID NO: 1156 - RNA, 19 nt, synthetic construct
  source 1..19: mol_type = other RNA; note = Description of Artificial Sequence: Synthetic oligonucleotide
ggactttgaccatcagagg

SEQ ID NO: 1157 - RNA, 19 nt, synthetic construct
  source 1..19: mol_type = other RNA; note = Description of Artificial Sequence: Synthetic oligonucleotide
agtcctggatgctgtccga

SEQ ID NO: 1158 - RNA, 19 nt, synthetic construct
  source 1..19: mol_type = other RNA; note = Description of Artificial Sequence: Synthetic oligonucleotide
tcggacagcatccaggact

SEQ ID NO: 1159 - RNA, 19 nt, synthetic construct
  source 1..19: mol_type = other RNA; note = Description of Artificial Sequence: Synthetic oligonucleotide
ttgcctctgggaagaccgc

SEQ ID NO: 1160 - RNA, 19 nt, synthetic construct
  source 1..19: mol_type = other RNA; note = Description of Artificial Sequence: Synthetic oligonucleotide
gcggtcttcccagaggcaa

SEQ ID NO: 1161 - RNA, 19 nt, synthetic construct
  source 1..19: mol_type = other RNA; note = Description of Artificial Sequence: Synthetic oligonucleotide
tggagagctgcacgggctc

SEQ ID NO: 1162 - RNA, 19 nt, synthetic construct
  source 1..19: mol_type = other RNA; note = Description of Artificial Sequence: Synthetic oligonucleotide
gagcccgtgcagctctcca

SEQ ID NO: 1163 - RNA, 19 nt, synthetic construct
  source 1..19: mol_type = other RNA; note = Description of Artificial Sequence: Synthetic oligonucleotide
gagagctgcacgggctcac

SEQ ID NO: 1164 - RNA, 19 nt, synthetic construct
  source 1..19: mol_type = other RNA; note = Description of Artificial Sequence: Synthetic oligonucleotide
gtgagcccgtgcagctctc

SEQ ID NO: 1165 - RNA, 19 nt, synthetic construct
  source 1..19: mol_type = other RNA; note = Description of Artificial Sequence: Synthetic oligonucleotide
gagctgcacgggctcacca

SEQ ID NO: 1166 - RNA, 19 nt, synthetic construct
  source 1..19: mol_type = other RNA; note = Description of Artificial Sequence: Synthetic oligonucleotide
tggtgagcccgtgcagctc

SEQ ID NO: 1167 - RNA, 19 nt, synthetic construct
  source 1..19: mol_type = other RNA; note = Description of Artificial Sequence: Synthetic oligonucleotide
tacaccatcgcagccctgc

SEQ ID NO: 1168 - RNA, 19 nt, synthetic construct
  source 1..19: mol_type = other RNA; note = Description of Artificial Sequence: Synthetic oligonucleotide
gcagggctgcgatggtgta

SEQ ID NO: 1169 - RNA, 19 nt, synthetic construct
  source 1..19: mol_type = other RNA; note = Description of Artificial Sequence: Synthetic oligonucleotide
gtcctggatgctgtccgag

SEQ ID NO: 1170 - RNA, 19 nt, synthetic construct
  source 1..19: mol_type = other RNA; note = Description of Artificial Sequence: Synthetic oligonucleotide
ctcggacagcatccaggac

SEQ ID NO: 1171 - RNA, 19 nt, synthetic construct
  source 1..19: mol_type = other RNA; note = Description of Artificial Sequence: Synthetic oligonucleotide
agagctgcacgggctcacc

SEQ ID NO: 1172 - RNA, 19 nt, synthetic construct
  source 1..19: mol_type = other RNA; note = Description of Artificial Sequence: Synthetic oligonucleotide
ggtgagcccgtgcagctct

SEQ ID NO: 1173 - RNA, 21 nt, synthetic construct
  source 1..21: mol_type = other RNA; note = Description of Artificial Sequence: Synthetic oligonucleotide; note = Description of Combined DNA/RNA Molecule: Synthetic oligonucleotide
  misc_difference 20: note = modified_base - a, c, t, g, unknown or other, u or 2'-deoxythymidine-3'-phosphate
  misc_difference 21: note = modified_base - a, c, t, g, unknown or other, u or 2'-deoxythymidine-3'-phosphate
gtcctctgatggtcaaagtnn

SEQ ID NO: 1174 - RNA, 21 nt, synthetic construct
  source 1..21: mol_type = other RNA; note = Description of Artificial Sequence: Synthetic oligonucleotide; note = Description of Combined DNA/RNA Molecule: Synthetic oligonucleotide
  misc_difference 20: note = modified_base - a, c, t, g, unknown or other, u or 2'-deoxythymidine-3'-phosphate
  misc_difference 21: note = modified_base - a, c, t, g, unknown or other, u or 2'-deoxythymidine-3'-phosphate
actttgaccatcagaggacnn

SEQ ID NO: 1175 - RNA, 21 nt, synthetic construct
  source 1..21: mol_type = other RNA; note = Description of Artificial Sequence: Synthetic oligonucleotide; note = Description of Combined DNA/RNA Molecule: Synthetic oligonucleotide
  misc_difference 20: note = modified_base - a, c, t, g, unknown or other, u or 2'-deoxythymidine-3'-phosphate
  misc_difference 21: note = modified_base - a, c, t, g, unknown or other, u or 2'-deoxythymidine-3'-phosphate
ttcttgctctataaaccgtnn

SEQ ID NO: 1176 - RNA, 21 nt, synthetic construct
  source 1..21: mol_type = other RNA; note = Description of Artificial Sequence: Synthetic oligonucleotide; note = Description of Combined DNA/RNA Molecule: Synthetic oligonucleotide
  misc_difference 20: note = modified_base - a, c, t, g, unknown or other, u or 2'-deoxythymidine-3'-phosphate
  misc_difference 21: note = modified_base - a, c, t, g, unknown or other, u or 2'-deoxythymidine-3'-phosphate
acggtttatagagcaagaann

SEQ ID NO: 1177 - RNA, 21 nt, synthetic construct
  source 1..21: mol_type = other RNA; note = Description of Artificial Sequence: Synthetic oligonucleotide; note = Description of Combined DNA/RNA Molecule: Synthetic oligonucleotide
  misc_difference 20: note = modified_base - a, c, t, g, unknown or other, u or 2'-deoxythymidine-3'-phosphate
  misc_difference 21: note = modified_base - a, c, t, g, unknown or other, u or 2'-deoxythymidine-3'-phosphate
ctctataaaccgtgttagcnn

SEQ ID NO: 1178 - RNA, 21 nt, synthetic construct
  source 1..21: mol_type = other RNA; note = Description of Artificial Sequence: Synthetic oligonucleotide; note = Description of Combined DNA/RNA Molecule: Synthetic oligonucleotide
  misc_difference 20: note = modified_base - a, c, t, g, unknown or other, u or 2'-deoxythymidine-3'-phosphate
  misc_difference 21: note = modified_base - a, c, t, g, unknown or other, u or 2'-deoxythymidine-3'-phosphate
gctaacacggtttatagagnn

SEQ ID NO: 1179 - RNA, 21 nt, synthetic construct
  source 1..21: mol_type = other RNA; note = Description of Artificial Sequence: Synthetic oligonucleotide; note = Description of Combined DNA/RNA Molecule: Synthetic oligonucleotide
  misc_difference 20: note = modified_base - a, c, t, g, unknown or other, u or 2'-deoxythymidine-3'-phosphate
  misc_difference 21: note = modified_base - a, c, t, g, unknown or other, u or 2'-deoxythymidine-3'-phosphate
tcgccactacaccatcgcann

SEQ ID NO: 1180 - RNA, 21 nt, synthetic construct
  source 1..21: mol_type = other RNA; note = Description of Artificial Sequence: Synthetic oligonucleotide; note = Description of Combined DNA/RNA Molecule: Synthetic oligonucleotide
  misc_difference 20: note = modified_base - a, c, t, g, unknown or other, u or 2'-deoxythymidine-3'-phosphate
  misc_difference 21: note = modified_base - a, c, t, g, unknown or other, u or 2'-deoxythymidine-3'-phosphate
tgcgatggtgtagtggcgann

SEQ ID NO: 1181 - RNA, 21 nt, synthetic construct
  source 1..21: mol_type = other RNA; note = Description of Artificial Sequence: Synthetic oligonucleotide; note = Description of Combined DNA/RNA Molecule: Synthetic oligonucleotide
  misc_difference 20: note = modified_base - a, c, t, g, unknown or other, u or 2'-deoxythymidine-3'-phosphate
  misc_difference 21: note = modified_base - a, c, t, g, unknown or other, u or 2'-deoxythymidine-3'-phosphate
tcttgctctataaaccgtgnn

SEQ ID NO: 1182 - RNA, 21 nt, synthetic construct
  source 1..21: mol_type = other RNA; note = Description of Artificial Sequence: Synthetic oligonucleotide; note = Description of Combined DNA/RNA Molecule: Synthetic oligonucleotide
  misc_difference 20: note = modified_base - a, c, t, g, unknown or other, u or 2'-deoxythymidine-3'-phosphate
  misc_difference 21: note = modified_base - a, c, t, g, unknown or other, u or 2'-deoxythymidine-3'-phosphate
cacggtttatagagcaagann

SEQ ID NO: 1183 - RNA, 21 nt, synthetic construct
  source 1..21: mol_type = other RNA; note = Description of Artificial Sequence: Synthetic oligonucleotide; note = Description of Combined DNA/RNA Molecule: Synthetic oligonucleotide
  misc_difference 20: note = modified_base - a, c, t, g, unknown or other, u or 2'-deoxythymidine-3'-phosphate
  misc_difference 21: note = modified_base - a, c, t, g, unknown or other, u or 2'-deoxythymidine-3'-phosphate
tgctctataaaccgtgttann

SEQ ID NO: 1184 - RNA, 21 nt, synthetic construct
  source 1..21: mol_type = other RNA; note = Description of Artificial Sequence: Synthetic oligonucleotide; note = Description of Combined DNA/RNA Molecule: Synthetic oligonucleotide
  misc_difference 20: note = modified_base - a, c, t, g, unknown or other, u or 2'-deoxythymidine-3'-phosphate
  misc_difference 21: note = modified_base - a, c, t, g, unknown or other, u or 2'-deoxythymidine-3'-phosphate
taacacggtttatagagcann

SEQ ID NO: 1185 - RNA, 21 nt, synthetic construct
  source 1..21: mol_type = other RNA; note = Description of Artificial Sequence: Synthetic oligonucleotide; note = Description of Combined DNA/RNA Molecule: Synthetic oligonucleotide
  misc_difference 20: note = modified_base - a, c, t, g, unknown or other, u or 2'-deoxythymidine-3'-phosphate
  misc_difference 21: note = modified_base - a, c, t, g, unknown or other, u or 2'-deoxythymidine-3'-phosphate
cagtgttcttgctctataann

SEQ ID NO: 1186 - RNA, 21 nt, synthetic construct
  source 1..21: mol_type = other RNA; note = Description of Artificial Sequence: Synthetic oligonucleotide; note = Description of Combined DNA/RNA Molecule: Synthetic oligonucleotide
  misc_difference 20: note = modified_base - a, c, t, g, unknown or other, u or 2'-deoxythymidine-3'-phosphate
  misc_difference 21: note = modified_base - a, c, t, g, unknown or other, u or 2'-deoxythymidine-3'-phosphate
ttatagagcaagaacactgnn

SEQ ID NO: 1187 - RNA, 21 nt, synthetic construct
  source 1..21: mol_type = other RNA; note = Description of Artificial Sequence: Synthetic oligonucleotide; note = Description of Combined DNA/RNA Molecule: Synthetic oligonucleotide
  misc_difference 20: note = modified_base - a, c, t, g, unknown or other, u or 2'-deoxythymidine-3'-phosphate
  misc_difference 21: note = modified_base - a, c, t, g, unknown or other, u or 2'-deoxythymidine-3'-phosphate
gctctataaaccgtgttagnn

SEQ ID NO: 1188 - RNA, 21 nt, synthetic construct
  source 1..21: mol_type = other RNA; note = Description of Artificial Sequence: Synthetic oligonucleotide; note = Description of Combined DNA/RNA Molecule: Synthetic oligonucleotide
  misc_difference 20: note = modified_base - a, c, t, g, unknown or other, u or 2'-deoxythymidine-3'-phosphate
  misc_difference 21: note = modified_base - a, c, t, g, unknown or other, u or 2'-deoxythymidine-3'-phosphate
ctaacacggtttatagagcnn

SEQ ID NO: 1189 - RNA, 21 nt, synthetic construct
  source 1..21: mol_type = other RNA; note = Description of Artificial Sequence: Synthetic oligonucleotide; note = Description of Combined DNA/RNA Molecule: Synthetic oligonucleotide
  misc_difference 20: note = modified_base - a, c, t, g, unknown or other, u or 2'-deoxythymidine-3'-phosphate
  misc_difference 21: note = modified_base - a, c, t, g, unknown or other, u or 2'-deoxythymidine-3'-phosphate
cctggatgctgtccgaggcnn

SEQ ID NO: 1190 - RNA, 21 nt, synthetic construct
  source 1..21: mol_type = other RNA; note = Description of Artificial Sequence: Synthetic oligonucleotide; note = Description of Combined DNA/RNA Molecule: Synthetic oligonucleotide
  misc_difference 20: note = modified_base - a, c, t, g, unknown or other, u or 2'-deoxythymidine-3'-phosphate
  misc_difference 21: note = modified_base - a, c, t, g, unknown or other, u or 2'-deoxythymidine-3'-phosphate
gcctcggacagcatccaggnn

SEQ ID NO: 1191 - RNA, 21 nt, synthetic construct
  source 1..21: mol_type = other RNA; note = Description of Artificial Sequence: Synthetic oligonucleotide; note = Description of Combined DNA/RNA Molecule: Synthetic oligonucleotide
  misc_difference 20: note = modified_base - a, c, t, g, unknown or other, u or 2'-deoxythymidine-3'-phosphate
  misc_difference 21: note = modified_base - a, c, t, g, unknown or other, u or 2'-deoxythymidine-3'-phosphate
tctgatggtcaaagtcctgnn

SEQ ID NO: 1192 - RNA, 21 nt, synthetic construct
  source 1..21: mol_type = other RNA; note = Description of Artificial Sequence: Synthetic oligonucleotide; note = Description of Combined DNA/RNA Molecule: Synthetic oligonucleotide
  misc_difference 20: note = modified_base - a, c, t, g, unknown or other, u or 2'-deoxythymidine-3'-phosphate
  misc_difference 21: note = modified_base - a, c, t, g, unknown or other, u or 2'-deoxythymidine-3'-phosphate
caggactttgaccatcagann

SEQ ID NO: 1193 - RNA, 21 nt, synthetic construct
  source 1..21: mol_type = other RNA; note = Description of Artificial Sequence: Synthetic oligonucleotide; note = Description of Combined DNA/RNA Molecule: Synthetic oligonucleotide
  misc_difference 20: note = modified_base - a, c, t, g, unknown or other, u or 2'-deoxythymidine-3'-phosphate
  misc_difference 21: note = modified_base - a, c, t, g, unknown or other, u or 2'-deoxythymidine-3'-phosphate
ctggagagctgcacgggctnn

SEQ ID NO: 1194 - RNA, 21 nt, synthetic construct
  source 1..21: mol_type = other RNA; note = Description of Artificial Sequence: Synthetic oligonucleotide; note = Description of Combined DNA/RNA Molecule: Synthetic oligonucleotide
  misc_difference 20: note = modified_base - a, c, t, g, unknown or other, u or 2'-deoxythymidine-3'-phosphate
  misc_difference 21: note = modified_base - a, c, t, g, unknown or other, u or 2'-deoxythymidine-3'-phosphate
agcccgtgcagctctccagnn

SEQ ID NO: 1195 - RNA, 21 nt, synthetic construct
  source 1..21: mol_type = other RNA; note = Description of Artificial Sequence: Synthetic oligonucleotide; note = Description of Combined DNA/RNA Molecule: Synthetic oligonucleotide
  misc_difference 20: note = modified_base - a, c, t, g, unknown or other, u or 2'-deoxythymidine-3'-phosphate
  misc_difference 21: note = modified_base - a, c, t, g, unknown or other, u or 2'-deoxythymidine-3'-phosphate
tctataaaccgtgttagcann

SEQ ID NO: 1196 - RNA, 21 nt, synthetic construct
  source 1..21: mol_type = other RNA; note = Description of Artificial Sequence: Synthetic oligonucleotide; note = Description of Combined DNA/RNA Molecule: Synthetic oligonucleotide
  misc_difference 20: note = modified_base - a, c, t, g, unknown or other, u or 2'-deoxythymidine-3'-phosphate
  misc_difference 21: note = modified_base - a, c, t, g, unknown or other, u or 2'-deoxythymidine-3'-phosphate
tgctaacacggtttatagann

SEQ ID NO: 1197 - RNA, 21 nt, synthetic construct
  source 1..21: mol_type = other RNA; note = Description of Artificial Sequence: Synthetic oligonucleotide; note = Description of Combined DNA/RNA Molecule: Synthetic oligonucleotide
  misc_difference 20: note = modified_base - a, c, t, g, unknown or other, u or 2'-deoxythymidine-3'-phosphate
  misc_difference 21: note = modified_base - a, c, t, g, unknown or other, u or 2'-deoxythymidine-3'-phosphate
aacagtgttcttgctctatnn

SEQ ID NO: 1198 - RNA, 21 nt, synthetic construct
  source 1..21: mol_type = other RNA; note = Description of Artificial Sequence: Synthetic oligonucleotide; note = Description of Combined DNA/RNA Molecule: Synthetic oligonucleotide
  misc_difference 20: note = modified_base - a, c, t, g, unknown or other, u or 2'-deoxythymidine-3'-phosphate
  misc_difference 21: note = modified_base - a, c, t, g, unknown or other, u or 2'-deoxythymidine-3'-phosphate
atagagcaagaacactgttnn

SEQ ID NO: 1199 - RNA, 21 nt, synthetic construct
  source 1..21: mol_type = other RNA; note = Description of Artificial Sequence: Synthetic oligonucleotide; note = Description of Combined DNA/RNA Molecule: Synthetic oligonucleotide
  misc_difference 20: note = modified_base - a, c, t, g, unknown or other, u or 2'-deoxythymidine-3'-phosphate
  misc_difference 21: note = modified_base - a, c, t, g, unknown or other, u or 2'-deoxythymidine-3'-phosphate
ctctgatggtcaaagtcctnn

SEQ ID NO: 1200 - RNA, 21 nt, synthetic construct
  source 1..21: mol_type = other RNA; note = Description of Artificial Sequence: Synthetic oligonucleotide; note = Description of Combined DNA/RNA Molecule: Synthetic oligonucleotide
  misc_difference 20: note = modified_base - a, c, t, g, unknown or other, u or 2'-deoxythymidine-3'-phosphate
  misc_difference 21: note = modified_base - a, c, t, g, unknown or other, u or 2'-deoxythymidine-3'-phosphate
aggactttgaccatcagagnn

SEQ ID NO: 1201 - RNA, 21 nt, synthetic construct
  source 1..21: mol_type = other RNA; note = Description of Artificial Sequence: Synthetic oligonucleotide; note = Description of Combined DNA/RNA Molecule: Synthetic oligonucleotide
  misc_difference 20: note = modified_base - a, c, t, g, unknown or other, u or 2'-deoxythymidine-3'-phosphate
  misc_difference 21: note = modified_base - a, c, t, g, unknown or other, u or 2'-deoxythymidine-3'-phosphate
tgctgtccgaggcagccctnn

SEQ ID NO: 1202 - RNA, 21 nt, synthetic construct
  source 1..21: mol_type = other RNA; note = Description of Artificial Sequence: Synthetic oligonucleotide; note = Description of Combined DNA/RNA Molecule: Synthetic oligonucleotide
  misc_difference 20: note = modified_base - a, c, t, g, unknown or other, u or 2'-deoxythymidine-3'-phosphate
  misc_difference 21: note = modified_base - a, c, t, g, unknown or other, u or 2'-deoxythymidine-3'-phosphate
agggctgcctcggacagcann

SEQ ID NO: 1203 - RNA, 21 nt, synthetic construct
  source 1..21: mol_type = other RNA; note = Description of Artificial Sequence: Synthetic oligonucleotide; note = Description of Combined DNA/RNA Molecule: Synthetic oligonucleotide
  misc_difference 20: note = modified_base - a, c, t, g, unknown or other, u or 2'-deoxythymidine-3'-phosphate
  misc_difference 21: note = modified_base - a, c, t, g, unknown or other, u or 2'-deoxythymidine-3'-phosphate
gtctggagagctgcacgggnn

SEQ ID NO: 1204 - RNA, 21 nt, synthetic construct
  source 1..21: mol_type = other RNA; note = Description of Artificial Sequence: Synthetic oligonucleotide; note = Description of Combined DNA/RNA Molecule: Synthetic oligonucleotide
  misc_difference 20: note = modified_base - a, c, t, g, unknown or other, u or 2'-deoxythymidine-3'-phosphate
  misc_difference 21: note = modified_base - a, c, t, g, unknown or other, u or 2'-deoxythymidine-3'-phosphate
cccgtgcagctctccagacnn

SEQ ID NO: 1205 - RNA, 21 nt, synthetic construct
  source 1..21: mol_type = other RNA; note = Description of Artificial Sequence: Synthetic oligonucleotide; note = Description of Combined DNA/RNA Molecule: Synthetic oligonucleotide
  misc_difference 20: note = modified_base - a, c, t, g, unknown or other, u or 2'-deoxythymidine-3'-phosphate
  misc_difference 21: note = modified_base - a, c, t, g, unknown or other, u or 2'-deoxythymidine-3'-phosphate
acagtgttcttgctctatann

SEQ ID NO: 1206 - RNA, 21 nt, synthetic construct
  source 1..21: mol_type = other RNA; note = Description of Artificial Sequence: Synthetic oligonucleotide; note = Description of Combined DNA/RNA Molecule: Synthetic oligonucleotide
  misc_difference 20: note = modified_base - a, c, t, g, unknown or other, u or 2'-deoxythymidine-3'-phosphate
  misc_difference 21: note = modified_base - a, c, t, g, unknown or other, u or 2'-deoxythymidine-3'-phosphate
tatagagcaagaacactgtnn

SEQ ID NO: 1207 - RNA, 21 nt, synthetic construct
  source 1..21: mol_type = other RNA; note = Description of Artificial Sequence: Synthetic oligonucleotide; note = Description of Combined DNA/RNA Molecule: Synthetic oligonucleotide
  misc_difference 20: note = modified_base - a, c, t, g, unknown or other, u or 2'-deoxythymidine-3'-phosphate
  misc_difference 21: note = modified_base - a, c, t, g, unknown or other, u or 2'-deoxythymidine-3'-phosphate
cctctgatggtcaaagtccnn

SEQ ID NO: 1208 - RNA, 21 nt, synthetic construct
  source 1..21: mol_type = other RNA; note = Description of Artificial Sequence: Synthetic oligonucleotide; note = Description of Combined DNA/RNA Molecule: Synthetic oligonucleotide
  misc_difference 20: note = modified_base - a, c, t, g, unknown or other, u or 2'-deoxythymidine-3'-phosphate
  misc_difference 21: note = modified_base - a, c, t, g, unknown or other, u or 2'-deoxythymidine-3'-phosphate
ggactttgaccatcagaggnn

SEQ ID NO: 1209 - RNA, 21 nt, synthetic construct
  source 1..21: mol_type = other RNA; note = Description of Artificial Sequence: Synthetic oligonucleotide; note = Description of Combined DNA/RNA Molecule: Synthetic oligonucleotide
  misc_difference 20: note = modified_base - a, c, t, g, unknown or other, u or 2'-deoxythymidine-3'-phosphate
  misc_difference 21: note = modified_base - a, c, t, g, unknown or other, u or 2'-deoxythymidine-3'-phosphate
agtcctggatgctgtccgann

SEQ ID NO: 1210 - RNA, 21 nt, synthetic construct
  source 1..21: mol_type = other RNA; note = Description of Artificial Sequence: Synthetic oligonucleotide; note = Description of Combined DNA/RNA Molecule: Synthetic oligonucleotide
  misc_difference 20: note = modified_base - a, c, t, g, unknown or other, u or 2'-deoxythymidine-3'-phosphate
  misc_difference 21: note = modified_base - a, c, t, g, unknown or other, u or 2'-deoxythymidine-3'-phosphate
tcggacagcatccaggactnn

SEQ ID NO: 1211 - RNA, 21 nt, synthetic construct
  source 1..21: mol_type = other RNA; note = Description of Artificial Sequence: Synthetic oligonucleotide; note = Description of Combined DNA/RNA Molecule: Synthetic oligonucleotide
  misc_difference 20: note = modified_base - a, c, t, g, unknown or other, u or 2'-deoxythymidine-3'-phosphate
  misc_difference 21: note = modified_base - a, c, t, g, unknown or other, u or 2'-deoxythymidine-3'-phosphate
ttgcctctgggaagaccgcnn

SEQ ID NO: 1212 - RNA, 21 nt, synthetic construct
  source 1..21: mol_type = other RNA; note = Description of Artificial Sequence: Synthetic oligonucleotide; note = Description of Combined DNA/RNA Molecule: Synthetic oligonucleotide
  misc_difference 20: note = modified_base - a, c, t, g, unknown or other, u or 2'-deoxythymidine-3'-phosphate
  misc_difference 21: note = modified_base - a, c, t, g, unknown or other, u or 2'-deoxythymidine-3'-phosphate
gcggtcttcccagaggcaann

SEQ ID NO: 1213 - RNA, 21 nt, synthetic construct
  source 1..21: mol_type = other RNA; note = Description of Artificial Sequence: Synthetic oligonucleotide; note = Description of Combined DNA/RNA Molecule: Synthetic oligonucleotide
  misc_difference 20: note = modified_base - a, c, t, g, unknown or other, u or 2'-deoxythymidine-3'-phosphate
  misc_difference 21: note = modified_base - a, c, t, g, unknown or other, u or 2'-deoxythymidine-3'-phosphate
tggagagctgcacgggctcnn

SEQ ID NO: 1214 - RNA, 21 nt, synthetic construct
  source 1..21: mol_type = other RNA; note = Description of Artificial Sequence: Synthetic oligonucleotide; note = Description of Combined DNA/RNA Molecule: Synthetic oligonucleotide
  misc_difference 20: note = modified_base - a, c, t, g, unknown or other, u or 2'-deoxythymidine-3'-phosphate
  misc_difference 21: note = modified_base - a, c, t, g, unknown or other, u or 2'-deoxythymidine-3'-phosphate
gagcccgtgcagctctccann

SEQ ID NO: 1215 - RNA, 21 nt, synthetic construct
  source 1..21: mol_type = other RNA; note = Description of Artificial Sequence: Synthetic oligonucleotide; note = Description of Combined DNA/RNA Molecule: Synthetic oligonucleotide
  misc_difference 20: note = modified_base - a, c, t, g, unknown or other, u or 2'-deoxythymidine-3'-phosphate
  misc_difference 21: note = modified_base - a, c, t, g, unknown or other, u or 2'-deoxythymidine-3'-phosphate
gagagctgcacgggctcacnn

SEQ ID NO: 1216 - RNA, 21 nt, synthetic construct
  source 1..21: mol_type = other RNA; note = Description of Artificial Sequence: Synthetic oligonucleotide; note = Description of Combined DNA/RNA Molecule: Synthetic oligonucleotide
  misc_difference 20: note = modified_base - a, c, t, g, unknown or other, u or 2'-deoxythymidine-3'-phosphate
  misc_difference 21: note = modified_base - a, c, t, g, unknown or other, u or 2'-deoxythymidine-3'-phosphate
gtgagcccgtgcagctctcnn

SEQ ID NO: 1217 - RNA, 21 nt, synthetic construct
  source 1..21: mol_type = other RNA; note = Description of Artificial Sequence: Synthetic oligonucleotide; note = Description of Combined DNA/RNA Molecule: Synthetic oligonucleotide
  misc_difference 20: note = modified_base - a, c, t, g, unknown or other, u or 2'-deoxythymidine-3'-phosphate
  misc_difference 21: note = modified_base - a, c, t, g, unknown or other, u or 2'-deoxythymidine-3'-phosphate
gagctgcacgggctcaccann

SEQ ID NO: 1218 - RNA, 21 nt, synthetic construct
  source 1..21: mol_type = other RNA; note = Description of Artificial Sequence: Synthetic oligonucleotide; note = Description of Combined DNA/RNA Molecule: Synthetic oligonucleotide
  misc_difference 20: note = modified_base - a, c, t, g, unknown or other, u or 2'-deoxythymidine-3'-phosphate
  misc_difference 21: note = modified_base - a, c, t, g, unknown or other, u or 2'-deoxythymidine-3'-phosphate
tggtgagcccgtgcagctcnn

SEQ ID NO: 1219 - RNA, 21 nt, synthetic construct
  source 1..21: mol_type = other RNA; note = Description of Artificial Sequence: Synthetic oligonucleotide; note = Description of Combined DNA/RNA Molecule: Synthetic oligonucleotide
  misc_difference 20: note = modified_base - a, c, t, g, unknown or other, u or 2'-deoxythymidine-3'-phosphate
  misc_difference 21: note = modified_base - a, c, t, g, unknown or other, u or 2'-deoxythymidine-3'-phosphate
tacaccatcgcagccctgcnn

SEQ ID NO: 1220 - RNA, 21 nt, synthetic construct
  source 1..21: mol_type = other RNA; note = Description of Artificial Sequence: Synthetic oligonucleotide; note = Description of Combined DNA/RNA Molecule: Synthetic oligonucleotide
  misc_difference 20: note = modified_base - a, c, t, g, unknown or other, u or 2'-deoxythymidine-3'-phosphate
  misc_difference 21: note = modified_base - a, c, t, g, unknown or other, u or 2'-deoxythymidine-3'-phosphate
gcagggctgcgatggtgtann

SEQ ID NO: 1221 - RNA, 21 nt, synthetic construct
  source 1..21: mol_type = other RNA; note = Description of Artificial Sequence: Synthetic oligonucleotide; note = Description of Combined DNA/RNA Molecule: Synthetic oligonucleotide
  misc_difference 20: note = modified_base - a, c, t, g, unknown or other, u or 2'-deoxythymidine-3'-phosphate
  misc_difference 21: note = modified_base - a, c, t, g, unknown or other, u or 2'-deoxythymidine-3'-phosphate
gtcctggatgctgtccgagnn

SEQ ID NO: 1222 - RNA, 21 nt, synthetic construct
  source 1..21: mol_type = other RNA; note = Description of Artificial Sequence: Synthetic oligonucleotide; note = Description of Combined DNA/RNA Molecule: Synthetic oligonucleotide
  misc_difference 20: note = modified_base - a, c, t, g, unknown or other, u or 2'-deoxythymidine-3'-phosphate
  misc_difference 21: note = modified_base - a, c, t, g, unknown or other, u or 2'-deoxythymidine-3'-phosphate
ctcggacagcatccaggacnn

SEQ ID NO: 1223 - RNA, 21 nt, synthetic construct
  source 1..21: mol_type = other RNA; note = Description of Artificial Sequence: Synthetic oligonucleotide; note = Description of Combined DNA/RNA Molecule: Synthetic oligonucleotide
  misc_difference 20: note = modified_base - a, c, t, g, unknown or other, u or 2'-deoxythymidine-3'-phosphate
  misc_difference 21: note = modified_base - a, c, t, g, unknown or other, u or 2'-deoxythymidine-3'-phosphate
agagctgcacgggctcaccnn

SEQ ID NO: 1224 - RNA, 21 nt, synthetic construct
  source 1..21: mol_type = other RNA; note = Description of Artificial Sequence: Synthetic oligonucleotide; note = Description of Combined DNA/RNA Molecule: Synthetic oligonucleotide
  misc_difference 20: note = modified_base - a, c, t, g, unknown or other, u or 2'-deoxythymidine-3'-phosphate
  misc_difference 21: note = modified_base - a, c, t, g, unknown or other, u or 2'-deoxythymidine-3'-phosphate
ggtgagcccgtgcagctctnn

SEQ ID NO: 1225 - DNA, 21 bp, synthetic construct
  source 1..21: mol_type = other DNA; note = Description of Artificial Sequence: Synthetic oligonucleotide; note = Description of Combined DNA/RNA Molecule: Synthetic oligonucleotide
  misc_feature 1..19: note = RNA
  misc_feature 20..21: note = DNA
gtcctctgatggtcaaagttt

SEQ ID NO: 1226 - DNA, 21 bp, synthetic construct
  source 1..21: mol_type = other DNA; note = Description of Artificial Sequence: Synthetic oligonucleotide; note = Description of Combined DNA/RNA Molecule: Synthetic oligonucleotide
  misc_feature 1..19: note = RNA
  misc_feature 20..21: note = DNA
actttgaccatcagaggactt

SEQ ID NO: 1227 - DNA, 21 bp, synthetic construct
  source 1..21: mol_type = other DNA; note = Description of Artificial Sequence: Synthetic oligonucleotide; note = Description of Combined DNA/RNA Molecule: Synthetic oligonucleotide
  misc_feature 1..19: note = RNA
  misc_feature 20..21: note = DNA
ttcttgctctataaaccgttt

SEQ ID NO: 1228 - DNA, 21 bp, synthetic construct
  source 1..21: mol_type = other DNA; note = Description of Artificial Sequence: Synthetic oligonucleotide; note = Description of Combined DNA/RNA Molecule: Synthetic oligonucleotide
  misc_feature 1..19: note = RNA
  misc_feature 20..21: note = DNA
acggtttatagagcaagaatt

SEQ ID NO: 1229 - DNA, 21 bp, synthetic construct
  source 1..21: mol_type = other DNA; note = Description of Artificial Sequence: Synthetic oligonucleotide; note = Description of Combined DNA/RNA Molecule: Synthetic oligonucleotide
  misc_feature 1..19: note = RNA
  misc_feature 20..21: note = DNA
ctctataaaccgtgttagctt

SEQ ID NO: 1230 - DNA, 21 bp, synthetic construct
  source 1..21: mol_type = other DNA; note = Description of Artificial Sequence: Synthetic oligonucleotide; note = Description of Combined DNA/RNA Molecule: Synthetic oligonucleotide
  misc_feature 1..19: note = RNA
  misc_feature 20..21: note = DNA
gctaacacggtttatagagtt

SEQ ID NO: 1231 - DNA, 21 bp, synthetic construct
  source 1..21: mol_type = other DNA; note = Description of Artificial Sequence: Synthetic oligonucleotide; note = Description of Combined DNA/RNA Molecule: Synthetic oligonucleotide
  misc_feature 1..19: note = RNA
  misc_feature 20..21: note = DNA
tcgccactacaccatcgcatt

SEQ ID NO: 1232 - DNA, 21 bp, synthetic construct
  source 1..21: mol_type = other DNA; note = Description of Artificial Sequence: Synthetic oligonucleotide; note = Description of Combined DNA/RNA Molecule: Synthetic oligonucleotide
  misc_feature 1..19: note = RNA
  misc_feature 20..21: note = DNA
tgcgatggtgtagtggcgatt

SEQ ID NO: 1233 - DNA, 21 bp, synthetic construct
  source 1..21: mol_type = other DNA; note = Description of Artificial Sequence: Synthetic oligonucleotide; note = Description of Combined DNA/RNA Molecule: Synthetic oligonucleotide
  misc_feature 1..19: note = RNA
  misc_feature 20..21: note = DNA
tcttgctctataaaccgtgtt

SEQ ID NO: 1234 - DNA, 21 bp, synthetic construct
  source 1..21: mol_type = other DNA; note = Description of Artificial Sequence: Synthetic oligonucleotide; note = Description of Combined DNA/RNA Molecule: Synthetic oligonucleotide
  misc_feature 1..19: note = RNA
  misc_feature 20..21: note = DNA
cacggtttatagagcaagatt

SEQ ID NO: 1235 - DNA, 21 bp, synthetic construct
  source 1..21: mol_type = other DNA; note = Description of Artificial Sequence: Synthetic oligonucleotide; note = Description of Combined DNA/RNA Molecule: Synthetic oligonucleotide
  misc_feature 1..19: note = RNA
  misc_feature 20..21: note = DNA
tgctctataaaccgtgttatt

SEQ ID NO: 1236 - DNA, 21 bp, synthetic construct
  source 1..21: mol_type = other DNA; note = Description of Artificial Sequence: Synthetic oligonucleotide; note = Description of Combined DNA/RNA Molecule: Synthetic oligonucleotide
  misc_feature 1..19: note = RNA
  misc_feature 20..21: note = DNA
taacacggtttatagagcatt

SEQ ID NO: 1237 - DNA, 21 bp, synthetic construct
  source 1..21: mol_type = other DNA; note = Description of Artificial Sequence: Synthetic oligonucleotide; note = Description of Combined DNA/RNA Molecule: Synthetic oligonucleotide
  misc_feature 1..19: note = RNA
  misc_feature 20..21: note = DNA
cagtgttcttgctctataatt

SEQ ID NO: 1238 - DNA, 21 bp, synthetic construct
  source 1..21: mol_type = other DNA; note = Description of Artificial Sequence: Synthetic oligonucleotide; note = Description of Combined DNA/RNA Molecule: Synthetic oligonucleotide
  misc_feature 1..19: note = RNA
  misc_feature 20..21: note = DNA
ttatagagcaagaacactgtt

SEQ ID NO: 1239 - DNA, 21 bp, synthetic construct
  source 1..21: mol_type = other DNA; note = Description of Artificial Sequence: Synthetic oligonucleotide; note = Description of Combined DNA/RNA Molecule: Synthetic oligonucleotide
  misc_feature 1..19: note = RNA
  misc_feature 20..21: note = DNA
gctctataaaccgtgttagtt

SEQ ID NO: 1240 - DNA, 21 bp, synthetic construct
  source 1..21: mol_type = other DNA; note = Description of Artificial Sequence: Synthetic oligonucleotide; note = Description of Combined DNA/RNA Molecule: Synthetic oligonucleotide
  misc_feature 1..19: note = RNA
  misc_feature 20..21: note = DNA
ctaacacggtttatagagctt

SEQ ID NO: 1241 - DNA, 21 bp, synthetic construct
  source 1..21: mol_type = other DNA; note = Description of Artificial Sequence: Synthetic oligonucleotide; note = Description of Combined DNA/RNA Molecule: Synthetic oligonucleotide
  misc_feature 1..19: note = RNA
  misc_feature 20..21: note = DNA
cctggatgctgtccgaggctt

SEQ ID NO: 1242 - DNA, 21 bp, synthetic construct
  source 1..21: mol_type = other DNA; note = Description of Artificial Sequence: Synthetic oligonucleotide; note = Description of Combined DNA/RNA Molecule: Synthetic oligonucleotide
  misc_feature 1..19: note = RNA
  misc_feature 20..21: note = DNA
gcctcggacagcatccaggtt

SEQ ID NO: 1243 - DNA, 21 bp, synthetic construct
  source 1..21: mol_type = other DNA; note = Description of Artificial Sequence: Synthetic oligonucleotide; note = Description of Combined DNA/RNA Molecule: Synthetic oligonucleotide
  misc_feature 1..19: note = RNA
  misc_feature 20..21: note = DNA
tctgatggtcaaagtcctgtt

SEQ ID NO: 1244 - DNA, 21 bp, synthetic construct
  source 1..21: mol_type = other DNA; note = Description of Artificial Sequence: Synthetic oligonucleotide; note = Description of Combined DNA/RNA Molecule: Synthetic oligonucleotide
  misc_feature 1..19: note = RNA
  misc_feature 20..21: note = DNA
caggactttgaccatcagatt

SEQ ID NO: 1245 - DNA, 21 bp, synthetic construct
  source 1..21: mol_type = other DNA; note = Description of Artificial Sequence: Synthetic oligonucleotide; note = Description of Combined DNA/RNA Molecule: Synthetic oligonucleotide
  misc_feature 1..19: note = RNA
  misc_feature 20..21: note = DNA
ctggagagctgcacgggcttt

SEQ ID NO: 1246 - DNA, 21 bp, synthetic construct
  source 1..21: mol_type = other DNA; note = Description of Artificial Sequence: Synthetic oligonucleotide; note = Description of Combined DNA/RNA Molecule: Synthetic oligonucleotide
  misc_feature 1..19: note = RNA
  misc_feature 20..21: note = DNA
agcccgtgcagctctccagtt

SEQ ID NO: 1247 - DNA, 21 bp, synthetic construct
  source 1..21: mol_type = other DNA; note = Description of Artificial Sequence: Synthetic oligonucleotide; note = Description of Combined DNA/RNA Molecule: Synthetic oligonucleotide
  misc_feature 1..19: note = RNA
  misc_feature 20..21: note = DNA
tctataaaccgtgttagcatt

SEQ ID NO: 1248 - DNA, 21 bp, synthetic construct
  source 1..21: mol_type = other DNA; note = Description of Artificial Sequence: Synthetic oligonucleotide; note = Description of Combined DNA/RNA Molecule: Synthetic oligonucleotide
  misc_feature 1..19: note = RNA
  misc_feature 20..21: note = DNA
tgctaacacggtttatagatt

SEQ ID NO: 1249 - DNA, 21 bp, synthetic construct
  source 1..21: mol_type = other DNA; note = Description of Artificial Sequence: Synthetic oligonucleotide; note = Description of Combined DNA/RNA Molecule: Synthetic oligonucleotide
  misc_feature 1..19: note = RNA
  misc_feature 20..21: note = DNA
aacagtgttcttgctctattt

SEQ ID NO: 1250 - DNA, 21 bp, synthetic construct
  source 1..21: mol_type = other DNA; note = Description of Artificial Sequence: Synthetic oligonucleotide; note = Description of Combined DNA/RNA Molecule: Synthetic oligonucleotide
  misc_feature 1..19: note = RNA
  misc_feature 20..21: note = DNA
atagagcaagaacactgtttt

SEQ ID NO: 1251 - DNA, 21 bp, synthetic construct
  source 1..21: mol_type = other DNA; note = Description of Artificial Sequence: Synthetic oligonucleotide; note = Description of Combined DNA/RNA Molecule: Synthetic oligonucleotide
  misc_feature 1..19: note = RNA
  misc_feature 20..21: note = DNA
ctctgatggtcaaagtccttt

SEQ ID NO: 1252 - DNA, 21 bp, synthetic construct
  source 1..21: mol_type = other DNA; note = Description of Artificial Sequence: Synthetic oligonucleotide; note = Description of Combined DNA/RNA Molecule: Synthetic oligonucleotide
  misc_feature 1..19: note = RNA
  misc_feature 20..21: note = DNA
aggactttgaccatcagagtt

SEQ ID NO: 1253 - DNA, 21 bp, synthetic construct
  source 1..21: mol_type = other DNA; note = Description of Artificial Sequence: Synthetic oligonucleotide; note = Description of Combined DNA/RNA Molecule: Synthetic oligonucleotide
  misc_feature 1..19: note = RNA
  misc_feature 20..21: note = DNA
tgctgtccgaggcagcccttt

SEQ ID NO: 1254 - DNA, 21 bp, synthetic construct
  source 1..21: mol_type = other DNA; note = Description of Artificial Sequence: Synthetic oligonucleotide; note = Description of Combined DNA/RNA Molecule: Synthetic oligonucleotide
  misc_feature 1..19: note = RNA
  misc_feature 20..21: note = DNA
agggctgcctcggacagcatt

SEQ ID NO: 1255 - DNA, 21 bp, synthetic construct
  source 1..21: mol_type = other DNA; note = Description of Artificial Sequence: Synthetic oligonucleotide; note = Description of Combined DNA/RNA Molecule: Synthetic oligonucleotide
  misc_feature 1..19: note = RNA
  misc_feature 20..21: note = DNA
gtctggagagctgcacgggtt

SEQ ID NO: 1256 - DNA, 21 bp, synthetic construct
  source 1..21: mol_type = other DNA; note = Description of Artificial Sequence: Synthetic oligonucleotide; note = Description of Combined DNA/RNA Molecule: Synthetic oligonucleotide
  misc_feature 1..19: note = RNA
  misc_feature 20..21: note = DNA
cccgtgcagctctccagactt

SEQ ID NO: 1257 - DNA, 21 bp, synthetic construct
  source 1..21: mol_type = other DNA; note = Description of Artificial Sequence: Synthetic oligonucleotide; note = Description of Combined DNA/RNA Molecule: Synthetic oligonucleotide
  misc_feature 1..19: note = RNA
  misc_feature 20..21: note = DNA
acagtgttcttgctctatatt

SEQ ID NO: 1258 - DNA, 21 bp, synthetic construct
  source 1..21: mol_type = other DNA; note = Description of Artificial Sequence: Synthetic oligonucleotide; note = Description of Combined DNA/RNA Molecule: Synthetic oligonucleotide
  misc_feature 1..19: note = RNA
  misc_feature 20..21: note = DNA
tatagagcaagaacactgttt

SEQ ID NO: 1259 - DNA, 21 bp, synthetic construct
  source 1..21: mol_type = other DNA; note = Description of Artificial Sequence: Synthetic oligonucleotide; note = Description of Combined DNA/RNA Molecule: Synthetic oligonucleotide
  misc_feature 1..19: note = RNA
  misc_feature 20..21: note = DNA
cctctgatggtcaaagtcctt

SEQ ID NO: 1260 - DNA, 21 bp, synthetic construct
  source 1..21: mol_type = other DNA; note = Description of Artificial Sequence: Synthetic oligonucleotide; note = Description of Combined DNA/RNA Molecule: Synthetic oligonucleotide
  misc_feature 1..19: note = RNA
  misc_feature 20..21: note = DNA
ggactttgaccatcagaggtt

SEQ ID NO: 1261 - DNA, 21 bp, synthetic construct
  source 1..21: mol_type = other DNA; note = Description of Artificial Sequence: Synthetic oligonucleotide; note = Description of Combined DNA/RNA Molecule: Synthetic oligonucleotide
  misc_feature 1..19: note = RNA
  misc_feature 20..21: note = DNA
agtcctggatgctgtccgatt

SEQ ID NO: 1262 - DNA, 21 bp, synthetic construct
  source 1..21: mol_type = other DNA; note = Description of Artificial Sequence: Synthetic oligonucleotide; note = Description of Combined DNA/RNA Molecule: Synthetic oligonucleotide
  misc_feature 1..19: note = RNA
  misc_feature 20..21: note = DNA
tcggacagcatccaggacttt

SEQ ID NO: 1263 - DNA, 21 bp, synthetic construct
  source 1..21: mol_type = other DNA; note = Description of Artificial Sequence: Synthetic oligonucleotide; note = Description of Combined DNA/RNA Molecule: Synthetic oligonucleotide
  misc_feature 1..19: note = RNA
  misc_feature 20..21: note = DNA
ttgcctctgggaagaccgctt

SEQ ID NO: 1264 - DNA, 21 bp, synthetic construct
  source 1..21: mol_type = other DNA; note = Description of Artificial Sequence: Synthetic oligonucleotide; note = Description of Combined DNA/RNA Molecule: Synthetic oligonucleotide
  misc_feature 1..19: note = RNA
  misc_feature 20..21: note = DNA
gcggtcttcccagaggcaatt

SEQ ID NO: 1265 - DNA, 21 bp, synthetic construct
  source 1..21: mol_type = other DNA; note = Description of Artificial Sequence: Synthetic oligonucleotide; note = Description of Combined DNA/RNA Molecule: Synthetic oligonucleotide
  misc_feature 1..19: note = RNA
  misc_feature 20..21: note = DNA
tggagagctgcacgggctctt

SEQ ID NO: 1266 - DNA, 21 bp, synthetic construct
  source 1..21: mol_type = other DNA; note = Description of Artificial Sequence: Synthetic oligonucleotide; note = Description of Combined DNA/RNA Molecule: Synthetic oligonucleotide
  misc_feature 1..19: note = RNA
  misc_feature 20..21: note = DNA
gagcccgtgcagctctccatt

SEQ ID NO: 1267 - DNA, 21 bp, synthetic construct
  source 1..21: mol_type = other DNA; note = Description of Artificial Sequence: Synthetic oligonucleotide; note = Description of Combined DNA/RNA Molecule: Synthetic oligonucleotide
  misc_feature 1..19: note = RNA
  misc_feature 20..21: note = DNA
gagagctgcacgggctcactt

SEQ ID NO: 1268 - DNA, 21 bp, synthetic construct
  source 1..21: mol_type = other DNA; note = Description of Artificial Sequence: Synthetic oligonucleotide; note = Description of Combined DNA/RNA Molecule: Synthetic oligonucleotide
  misc_feature 1..19: note = RNA
  misc_feature 20..21: note = DNA
gtgagcccgtgcagctctctt

SEQ ID NO: 1269 - DNA, 21 bp, synthetic construct
  source 1..21: mol_type = other DNA; note = Description of Artificial Sequence: Synthetic oligonucleotide; note = Description of Combined DNA/RNA Molecule: Synthetic oligonucleotide
  misc_feature 1..19: note = RNA
  misc_feature 20..21: note = DNA
gagctgcacgggctcaccatt

SEQ ID NO: 1270 - DNA, 21 bp, synthetic construct
  source 1..21: mol_type = other DNA; note = Description of Artificial Sequence: Synthetic oligonucleotide; note = Description of Combined DNA/RNA Molecule: Synthetic oligonucleotide
  misc_feature 1..19: note = RNA
  misc_feature 20..21: note = DNA
tggtgagcccgtgcagctctt

SEQ ID NO: 1271 - DNA, 21 bp, synthetic construct
  source 1..21: mol_type = other DNA; note = Description of Artificial Sequence: Synthetic oligonucleotide; note = Description of Combined DNA/RNA Molecule: Synthetic oligonucleotide
  misc_feature 1..19: note = RNA
  misc_feature 20..21: note = DNA
tacaccatcgcagccctgctt

SEQ ID NO: 1272 - DNA, 21 bp, synthetic construct
  source 1..21: mol_type = other DNA; note = Description of Artificial Sequence: Synthetic oligonucleotide; note = Description of Combined DNA/RNA Molecule: Synthetic oligonucleotide
  misc_feature 1..19: note = RNA
  misc_feature 20..21: note = DNA
gcagggctgcgatggtgtatt

SEQ ID NO: 1273 - DNA, 21 bp, synthetic construct
  source 1..21: mol_type = other DNA; note = Description of Artificial Sequence: Synthetic oligonucleotide; note = Description of Combined DNA/RNA Molecule: Synthetic oligonucleotide
  misc_feature 1..19: note = RNA
  misc_feature 20..21: note = DNA
gtcctggatgctgtccgagtt

SEQ ID NO: 1274 - DNA, 21 bp, synthetic construct
  source 1..21: mol_type = other DNA; note = Description of Artificial Sequence: Synthetic oligonucleotide; note = Description of Combined DNA/RNA Molecule: Synthetic oligonucleotide
  misc_feature 1..19: note = RNA
  misc_feature 20..21: note = DNA
ctcggacagcatccaggactt

SEQ ID NO: 1275 - DNA, 21 bp, synthetic construct
  source 1..21: mol_type = other DNA; note = Description of Artificial Sequence: Synthetic oligonucleotide; note = Description of Combined DNA/RNA Molecule: Synthetic oligonucleotide
  misc_feature 1..19: note = RNA
  misc_feature 20..21: note = DNA
agagctgcacgggctcacctt

SEQ ID NO: 1276 - DNA, 21 bp, synthetic construct
  source 1..21: mol_type = other DNA; note = Description of Artificial Sequence: Synthetic oligonucleotide; note = Description of Combined DNA/RNA Molecule: Synthetic oligonucleotide
  misc_feature 1..19: note = RNA
  misc_feature 20..21: note = DNA
ggtgagcccgtgcagctcttt

SEQ ID NO: 1277 - DNA, 21 bp, synthetic construct
  source 1..21: mol_type = other DNA; note = Description of Artificial Sequence: Synthetic oligonucleotide; note = Description of Combined DNA/RNA Molecule: Synthetic oligonucleotide
  modified_base 2: mod_base = OTHER; note = 2'-O-methyluridine-3'-phosphate
  modified_base 3: mod_base = OTHER; note = 2'-O-methylcytidine-3'-phosphate
  modified_base 4: mod_base = OTHER; note = 2'-O-methylcytidine-3'-phosphate
  modified_base 5: mod_base = OTHER; note = 2'-O-methyluridine-3'-phosphate
  modified_base 6: mod_base = OTHER; note = 2'-O-methylcytidine-3'-phosphate
  modified_base 7: mod_base = OTHER; note = 2'-O-methyluridine-3'-phosphate
  modified_base 10: mod_base = OTHER; note = 2'-O-methyluridine-3'-phosphate
  modified_base 13: mod_base = OTHER; note = 2'-O-methyluridine-3'-phosphate
  modified_base 14: mod_base = OTHER; note = 2'-O-methylcytidine-3'-phosphate
  modified_base 19: mod_base = OTHER; note = 2'-O-methyluridine-3'-phosphate
  misc_feature 1..19: note = RNA
  misc_feature 20..21: note = DNA
gtcctctgatggtcaaagttt

SEQ ID NO: 1278 - DNA, 21 bp, synthetic construct
  source 1..21: mol_type = other DNA; note = Description of Artificial Sequence: Synthetic oligonucleotide; note = Description of Combined DNA/RNA Molecule: Synthetic oligonucleotide
  modified_base 9: mod_base = OTHER; note = 2'-O-methylcytidine-3'-phosphate
  modified_base 12: mod_base = OTHER; note = 2'-O-methylcytidine-3'-phosphate
  misc_feature 1..19: note = RNA
  misc_feature 20..21: note = DNA
actttgaccatcagaggactt

SEQ ID NO: 1279 - DNA, 21 bp, synthetic construct
  source 1..21: mol_type = other DNA; note = Description of Artificial Sequence: Synthetic oligonucleotide; note = Description of Combined DNA/RNA Molecule: Synthetic oligonucleotide
  modified_base 1: mod_base = OTHER; note = 2'-O-methyluridine-3'-phosphate
  modified_base 2: mod_base = OTHER; note = 2'-O-methyluridine-3'-phosphate
  modified_base 3: mod_base = OTHER; note = 2'-O-methylcytidine-3'-phosphate
  modified_base 4: mod_base = OTHER; note = 2'-O-methyluridine-3'-phosphate
  modified_base 5: mod_base = OTHER; note = 2'-O-methyluridine-3'-phosphate
  modified_base 7: mod_base = OTHER; note = 2'-O-methylcytidine-3'-phosphate
  modified_base 8: mod_base = OTHER; note = 2'-O-methyluridine-3'-phosphate
  modified_base 9: mod_base = OTHER; note = 2'-O-methylcytidine-3'-phosphate
  modified_base 10: mod_base = OTHER; note = 2'-O-methyluridine-3'-phosphate
  modified_base 12: mod_base = OTHER; note = 2'-O-methyluridine-3'-phosphate
  modified_base 16: mod_base = OTHER; note = 2'-O-methylcytidine-3'-phosphate
  modified_base 17: mod_base = OTHER; note = 2'-O-methylcytidine-3'-phosphate
  modified_base 19: mod_base = OTHER; note = 2'-O-methyluridine-3'-phosphate
  misc_feature 1..19: note = RNA
  misc_feature 20..21: note = DNA
ttcttgctctataaaccgttt

SEQ ID NO: 1280 - DNA, 21 bp, synthetic construct
  source 1..21: mol_type = other DNA; note = Description of Artificial Sequence: Synthetic oligonucleotide; note = Description of Combined DNA/RNA Molecule: Synthetic oligonucleotide
  modified_base 7: mod_base = OTHER; note = 2'-O-methyluridine-3'-phosphate
  modified_base 9: mod_base = OTHER; note = 2'-O-methyluridine-3'-phosphate
  modified_base 14: mod_base = OTHER; note = 2'-O-methylcytidine-3'-phosphate
  misc_feature 1..19: note = RNA
  misc_feature 20..21: note = DNA
acggtttatagagcaagaatt

SEQ ID NO: 1281 - DNA, 21 bp, synthetic construct
  source 1..21: mol_type = other DNA; note = Description of Artificial Sequence: Synthetic oligonucleotide; note = Description of Combined DNA/RNA Molecule: Synthetic oligonucleotide
  modified_base 1: mod_base = OTHER; note = 2'-O-methylcytidine-3'-phosphate
  modified_base 2: mod_base = OTHER; note = 2'-O-methyluridine-3'-phosphate
  modified_base 3: mod_base = OTHER; note = 2'-O-methylcytidine-3'-phosphate
  modified_base 4: mod_base = OTHER; note = 2'-O-methyluridine-3'-phosphate
  modified_base 6: mod_base = OTHER; note = 2'-O-methyluridine-3'-phosphate
  modified_base 10: mod_base = OTHER; note = 2'-O-methylcytidine-3'-phosphate
  modified_base 11: mod_base = OTHER; note = 2'-O-methylcytidine-3'-phosphate
  modified_base 13: mod_base = OTHER; note = 2'-O-methyluridine-3'-phosphate
  modified_base 15: mod_base = OTHER; note = 2'-O-methyluridine-3'-phosphate
  modified_base 16: mod_base = OTHER; note = 2'-O-methyluridine-3'-phosphate
  modified_base 19: mod_base = OTHER; note = 2'-O-methylcytidine-3'-phosphate
  misc_feature 1..19: note = RNA
  misc_feature 20..21: note = DNA
ctctataaaccgtgttagctt

SEQ ID NO: 1282 - DNA, 21 bp, synthetic construct
  source 1..21: mol_type = other DNA; note = Description of Artificial Sequence: Synthetic oligonucleotide; note = Description of Combined DNA/RNA Molecule: Synthetic oligonucleotide
  modified_base 3: mod_base = OTHER; note = 2'-O-methyluridine-3'-phosphate
  modified_base 6: mod_base = OTHER; note = 2'-O-methylcytidine-3'-phosphate
  modified_base 13: mod_base = OTHER; note = 2'-O-methyluridine-3'-phosphate
  modified_base 15: mod_base = OTHER; note = 2'-O-methyluridine-3'-phosphate
  misc_feature 1..19: note = RNA
  misc_feature 20..21: note = DNA
gctaacacggtttatagagtt

SEQ ID NO: 1283 - DNA, 21 bp, synthetic construct
  source 1..21: mol_type = other DNA; note = Description of Artificial Sequence: Synthetic oligonucleotide; note = Description of Combined DNA/RNA Molecule: Synthetic oligonucleotide
  modified_base 1: mod_base = OTHER; note = 2'-O-methyluridine-3'-phosphate
  modified_base 2: mod_base = OTHER; note = 2'-O-methylcytidine-3'-phosphate
  modified_base 4: mod_base = OTHER; note = 2'-O-methylcytidine-3'-phosphate
  modified_base 5: mod_base = OTHER; note = 2'-O-methylcytidine-3'-phosphate
  modified_base 7: mod_base = OTHER; note = 2'-O-methylcytidine-3'-phosphate
  modified_base 8: mod_base = OTHER; note = 2'-O-methyluridine-3'-phosphate
  modified_base 10: mod_base = OTHER; note = 2'-O-methylcytidine-3'-phosphate
  modified_base 12: mod_base = OTHER; note = 2'-O-methylcytidine-3'-phosphate
  modified_base 13: mod_base = OTHER; note = 2'-O-methylcytidine-3'-phosphate
  modified_base 15: mod_base = OTHER; note = 2'-O-methyluridine-3'-phosphate
  modified_base 16: mod_base = OTHER; note = 2'-O-methylcytidine-3'-phosphate
  modified_base 18: mod_base = OTHER; note = 2'-O-methylcytidine-3'-phosphate
  misc_feature 1..19: note = RNA
  misc_feature 20..21: note = DNA
tcgccactacaccatcgcatt

SEQ ID NO: 1284 - DNA, 21 bp, synthetic construct
  source 1..21: mol_type = other DNA; note = Description of Artificial Sequence: Synthetic oligonucleotide; note = Description of Combined DNA/RNA Molecule: Synthetic oligonucleotide
  modified_base 11: mod_base = OTHER; note = 2'-O-methyluridine-3'-phosphate
  misc_feature 1..19: note = RNA
  misc_feature 20..21: note = DNA
tgcgatggtgtagtggcgatt

SEQ ID NO: 1285 - DNA, 21 bp, synthetic construct
  source 1..21: mol_type = other DNA; note = Description of Artificial Sequence: Synthetic oligonucleotide; note = Description of Combined DNA/RNA Molecule: Synthetic oligonucleotide
  modified_base 1: mod_base = OTHER; note = 2'-O-methyluridine-3'-phosphate
  modified_base 2: mod_base = OTHER; note = 2'-O-methylcytidine-3'-phosphate
  modified_base 3: mod_base = OTHER; note = 2'-O-methyluridine-3'-phosphate
  modified_base 4: mod_base = OTHER; note = 2'-O-methyluridine-3'-phosphate
  modified_base 6: mod_base = OTHER; note = 2'-O-methylcytidine-3'-phosphate
  modified_base 7: mod_base = OTHER; note = 2'-O-methyluridine-3'-phosphate
  modified_base 8: mod_base = OTHER; note = 2'-O-methylcytidine-3'-phosphate
  modified_base 9: mod_base = OTHER; note = 2'-O-methyluridine-3'-phosphate
  modified_base 11: mod_base = OTHER; note = 2'-O-methyluridine-3'-phosphate
  modified_base 15: mod_base = OTHER; note = 2'-O-methylcytidine-3'-phosphate
  modified_base 16: mod_base = OTHER; note = 2'-O-methylcytidine-3'-phosphate
  modified_base 18: mod_base = OTHER; note = 2'-O-methyluridine-3'-phosphate
  misc_feature 1..19: note = RNA
  misc_feature 20..21: note = DNA
tcttgctctataaaccgtgtt

SEQ ID NO: 1286 - DNA, 21 bp, synthetic construct
  source 1..21: mol_type = other DNA; note = Description of Artificial Sequence: Synthetic oligonucleotide; note = Description of Combined DNA/RNA Molecule: Synthetic oligonucleotide
  modified_base 1: mod_base = OTHER; note = 2'-O-methylcytidine-3'-phosphate
  modified_base 8: mod_base = OTHER; note = 2'-O-methyluridine-3'-phosphate
  modified_base 10: mod_base = OTHER; note = 2'-O-methyluridine-3'-phosphate
  modified_base 15: mod_base = OTHER; note = 2'-O-methylcytidine-3'-phosphate
  misc_feature 1..19: note = RNA
  misc_feature 20..21: note = DNA
cacggtttatagagcaagatt

SEQ ID NO: 1287 - DNA, 21 bp, synthetic construct
  source 1..21: mol_type = other DNA; note = Description of Artificial Sequence: Synthetic oligonucleotide; note = Description of Combined DNA/RNA Molecule: Synthetic oligonucleotide
  modified_base 1: mod_base = OTHER; note = 2'-O-methyluridine-3'-phosphate
  modified_base 3: mod_base = OTHER; note = 2'-O-methylcytidine-3'-phosphate
  modified_base 4: mod_base = OTHER; note = 2'-O-methyluridine-3'-phosphate
  modified_base 5: mod_base = OTHER; note = 2'-O-methylcytidine-3'-phosphate
  modified_base 6: mod_base = OTHER; note = 2'-O-methyluridine-3'-phosphate
  modified_base 8: mod_base = OTHER; note = 2'-O-methyluridine-3'-phosphate
  modified_base 12: mod_base = OTHER; note = 2'-O-methylcytidine-3'-phosphate
  modified_base 13: mod_base = OTHER; note = 2'-O-methylcytidine-3'-phosphate
  modified_base 15: mod_base = OTHER; note = 2'-O-methyluridine-3'-phosphate
  modified_base 17: mod_base = OTHER; note = 2'-O-methyluridine-3'-phosphate
  modified_base 18: mod_base = OTHER; note = 2'-O-methyluridine-3'-phosphate
  misc_feature 1..19: note = RNA
  misc_feature 20..21: note = DNA
tgctctataaaccgtgttatt

SEQ ID NO: 1288 - DNA, 21 bp, synthetic construct
  source 1..21: mol_type = other DNA; note = Description of Artificial Sequence: Synthetic oligonucleotide; note = Description of Combined DNA/RNA Molecule: Synthetic oligonucleotide
  modified_base 1: mod_base = OTHER; note = 2'-O-methyluridine-3'-phosphate
  modified_base 4: mod_base = OTHER; note = 2'-O-methylcytidine-3'-phosphate
  modified_base 11: mod_base = OTHER; note = 2'-O-methyluridine-3'-phosphate
  modified_base 13: mod_base = OTHER; note = 2'-O-methyluridine-3'-phosphate
  modified_base 18: mod_base = OTHER; note = 2'-O-methylcytidine-3'-phosphate
  misc_feature 1..19: note = RNA
  misc_feature 20..21: note = DNA
taacacggtttatagagcatt

SEQ ID NO: 1289 - DNA, 21 bp, synthetic construct
  source 1..21: mol_type = other DNA; note = Description of Artificial Sequence: Synthetic oligonucleotide; note = Description of Combined DNA/RNA Molecule: Synthetic oligonucleotide
  modified_base 1: mod_base = OTHER; note = 2'-O-methylcytidine-3'-phosphate
  modified_base 4: mod_base = OTHER; note = 2'-O-methyluridine-3'-phosphate
  modified_base 6: mod_base = OTHER; note = 2'-O-methyluridine-3'-phosphate
  modified_base 7: mod_base = OTHER; note = 2'-O-methyluridine-3'-phosphate
  modified_base 8: mod_base = OTHER; note = 2'-O-methylcytidine-3'-phosphate
  modified_base 9: mod_base = OTHER; note = 2'-O-methyluridine-3'-phosphate
  modified_base 10: mod_base = OTHER; note = 2'-O-methyluridine-3'-phosphate
  modified_base 12: mod_base = OTHER; note = 2'-O-methylcytidine-3'-phosphate
  modified_base 13: mod_base = OTHER; note = 2'-O-methyluridine-3'-phosphate
  modified_base 14: mod_base = OTHER; note = 2'-O-methylcytidine-3'-phosphate
  modified_base 15: mod_base = OTHER; note = 2'-O-methyluridine-3'-phosphate
  modified_base 17: mod_base = OTHER; note = 2'-O-methyluridine-3'-phosphate
  misc_feature 1..19: note = RNA
  misc_feature 20..21: note = DNA
cagtgttcttgctctataatt

SEQ ID NO: 1290 - DNA, 21 bp, synthetic construct
  source 1..21: mol_type = other DNA; note = Description of Artificial Sequence: Synthetic oligonucleotide; note = Description of Combined DNA/RNA Molecule: Synthetic oligonucleotide
  modified_base 2: mod_base = OTHER; note = 2'-O-methyluridine-3'-phosphate
  modified_base 4: mod_base = OTHER; note = 2'-O-methyluridine-3'-phosphate
  modified_base 9: mod_base = OTHER; note = 2'-O-methylcytidine-3'-phosphate
  modified_base 15: mod_base = OTHER; note = 2'-O-methylcytidine-3'-phosphate
  misc_feature 1..19: note = RNA
  misc_feature 20..21: note = DNA
ttatagagcaagaacactgtt

SEQ ID NO: 1291 - DNA, 21 bp, synthetic construct
  source 1..21: mol_type = other DNA; note = Description of Artificial Sequence: Synthetic oligonucleotide; note = Description of Combined DNA/RNA Molecule: Synthetic oligonucleotide
  modified_base 2: mod_base = OTHER; note = 2'-O-methylcytidine-3'-phosphate
  modified_base 3: mod_base = OTHER; note = 2'-O-methyluridine-3'-phosphate
  modified_base 4: mod_base = OTHER; note = 2'-O-methylcytidine-3'-phosphate
  modified_base 5: mod_base = OTHER; note = 2'-O-methyluridine-3'-phosphate
  modified_base 7: mod_base = OTHER; note = 2'-O-methyluridine-3'-phosphate
  modified_base 11: mod_base = OTHER; note = 2'-O-methylcytidine-3'-phosphate
  modified_base 12: mod_base = OTHER; note = 2'-O-methylcytidine-3'-phosphate
  modified_base 14: mod_base = OTHER; note = 2'-O-methyluridine-3'-phosphate
  modified_base 16: mod_base = OTHER; note = 2'-O-methyluridine-3'-phosphate
  modified_base 17: mod_base = OTHER; note = 2'-O-methyluridine-3'-phosphate
  misc_feature 1..19: note = RNA
  misc_feature 20..21: note = DNA
gctctataaaccgtgttagtt

SEQ ID NO: 1292 - DNA, 21 bp, synthetic construct
  source 1..21: mol_type = other DNA; note = Description of Artificial Sequence: Synthetic oligonucleotide; note = Description of Combined DNA/RNA Molecule: Synthetic oligonucleotide
  modified_base 2: mod_base = OTHER; note = 2'-O-methyluridine-3'-phosphate
  modified_base 5: mod_base = OTHER; note = 2'-O-methylcytidine-3'-phosphate
  modified_base 12: mod_base = OTHER; note = 2'-O-methyluridine-3'-phosphate
  modified_base 14: mod_base = OTHER; note = 2'-O-methyluridine-3'-phosphate
  misc_feature 1..19: note = RNA
  misc_feature 20..21: note = DNA
ctaacacggtttatagagctt

SEQ ID NO: 1293 - DNA, 21 bp, synthetic construct
  source 1..21: mol_type = other DNA; note = Description of Artificial Sequence: Synthetic oligonucleotide; note = Description of Combined DNA/RNA Molecule: Synthetic oligonucleotide
  modified_base 1: mod_base = OTHER; note = 2'-O-methylcytidine-3'-phosphate
  modified_base 2: mod_base = OTHER; note = 2'-O-methylcytidine-3'-phosphate
  modified_base 3: mod_base = OTHER; note = 2'-O-methyluridine-3'-phosphate
  modified_base 7: mod_base = OTHER; note = 2'-O-methyluridine-3'-phosphate
  modified_base 9: mod_base = OTHER; note = 2'-O-methylcytidine-3'-phosphate
  modified_base 10: mod_base = OTHER; note = 2'-O-methyluridine-3'-phosphate
  modified_base 12: mod_base = OTHER; note = 2'-O-methyluridine-3'-phosphate
  modified_base 13: mod_base = OTHER; note = 2'-O-methylcytidine-3'-phosphate
  modified_base 14: mod_base = OTHER; note = 2'-O-methylcytidine-3'-phosphate
  modified_base 19: mod_base = OTHER; note = 2'-O-methylcytidine-3'-phosphate
  misc_feature 1..19: note = RNA
  misc_feature 20..21: note = DNA
cctggatgctgtccgaggctt

SEQ ID NO: 1294 - DNA, 21 bp, synthetic construct
  source 1..21: mol_type = other DNA; note = Description of Artificial Sequence: Synthetic oligonucleotide; note = Description of Combined DNA/RNA Molecule: Synthetic oligonucleotide
  modified_base 9: mod_base = OTHER; note = 2'-O-methylcytidine-3'-phosphate
  modified_base 12: mod_base = OTHER; note = 2'-O-methylcytidine-3'-phosphate
  modified_base 16: mod_base = OTHER; note = 2'-O-methylcytidine-3'-phosphate
  misc_feature 1..19: note = RNA
  misc_feature 20..21: note = DNA
gcctcggacagcatccaggtt

SEQ ID NO: 1295 - DNA, 21 bp, synthetic construct
  source 1..21: mol_type = other DNA; note = Description of Artificial Sequence: Synthetic oligonucleotide; note = Description of Combined DNA/RNA Molecule: Synthetic oligonucleotide
  modified_base 1: mod_base = OTHER; note = 2'-O-methyluridine-3'-phosphate
  modified_base 2: mod_base = OTHER; note = 2'-O-methylcytidine-3'-phosphate
  modified_base 3: mod_base = OTHER; note = 2'-O-methyluridine-3'-phosphate
  modified_base 6: mod_base = OTHER; note = 2'-O-methyluridine-3'-phosphate
  modified_base 9: mod_base = OTHER; note = 2'-O-methyluridine-3'-phosphate
  modified_base 10: mod_base = OTHER; note = 2'-O-methylcytidine-3'-phosphate
  modified_base 15: mod_base = OTHER; note = 2'-O-methyluridine-3'-phosphate
  modified_base 16: mod_base = OTHER; note = 2'-O-methylcytidine-3'-phosphate
  modified_base 17: mod_base = OTHER; note = 2'-O-methylcytidine-3'-phosphate
  modified_base 18: mod_base = OTHER; note = 2'-O-methyluridine-3'-phosphate
  misc_feature 1..19: note = RNA
  misc_feature 20..21: note = DNA
tctgatggtcaaagtcctgtt

SEQ ID NO: 1296 - DNA, 21 bp, synthetic construct
  source 1..21: mol_type = other DNA; note = Description of Artificial Sequence: Synthetic oligonucleotide; note = Description of Combined DNA/RNA Molecule: Synthetic oligonucleotide
  modified_base 1: mod_base = OTHER; note = 2'-O-methylcytidine-3'-phosphate
  modified_base 13: mod_base = OTHER; note = 2'-O-methylcytidine-3'-phosphate
  modified_base 16: mod_base = OTHER; note = 2'-O-methylcytidine-3'-phosphate
  misc_feature 1..19: note = RNA
  misc_feature 20..21: note = DNA
caggactttgaccatcagatt

SEQ ID NO: 1297 - DNA, 21 bp, synthetic construct
  source 1..21: mol_type = other DNA; note = Description of Artificial Sequence: Synthetic oligonucleotide; note = Description of Combined DNA/RNA Molecule: Synthetic oligonucleotide
  modified_base 1: mod_base = OTHER; note = 2'-O-methylcytidine-3'-phosphate
  modified_base 2: mod_base = OTHER; note = 2'-O-methyluridine-3'-phosphate
  modified_base 9: mod_base = OTHER; note = 2'-O-methylcytidine-3'-phosphate
  modified_base 10: mod_base = OTHER; note = 2'-O-methyluridine-3'-phosphate
  modified_base 12: mod_base = OTHER; note = 2'-O-methylcytidine-3'-phosphate
  modified_base 14: mod_base = OTHER; note = 2'-O-methylcytidine-3'-phosphate
  modified_base 18: mod_base = OTHER; note = 2'-O-methylcytidine-3'-phosphate
  modified_base 19: mod_base = OTHER; note = 2'-O-methyluridine-3'-phosphate
  misc_feature 1..19: note = RNA
  misc_feature 20..21: note = DNA
ctggagagctgcacgggcttt

SEQ ID NO: 1298 - DNA, 21 bp, synthetic construct
  source 1..21: mol_type = other DNA; note = Description of Artificial Sequence: Synthetic oligonucleotide; note = Description of Combined DNA/RNA Molecule: Synthetic oligonucleotide
  modified_base 9: mod_base = OTHER; note = 2'-O-methylcytidine-3'-phosphate
  modified_base 17: mod_base = OTHER; note = 2'-O-methylcytidine-3'-phosphate
  misc_feature 1..19: note = RNA
  misc_feature 20..21: note = DNA
agcccgtgcagctctccagtt

SEQ ID NO: 1299 - DNA, 21 bp, synthetic construct
  source 1..21: mol_type = other DNA; note = Description of Artificial Sequence: Synthetic oligonucleotide; note = Description of Combined DNA/RNA Molecule: Synthetic oligonucleotide
  modified_base 1: mod_base = OTHER; note = 2'-O-methyluridine-3'-phosphate
  modified_base 2: mod_base = OTHER; note = 2'-O-methylcytidine-3'-phosphate
  modified_base 3: mod_base = OTHER; note = 2'-O-methyluridine-3'-phosphate
  modified_base 5: mod_base = OTHER; note = 2'-O-methyluridine-3'-phosphate
  modified_base 9: mod_base = OTHER; note = 2'-O-methylcytidine-3'-phosphate
  modified_base 10: mod_base = OTHER; note = 2'-O-methylcytidine-3'-phosphate
  modified_base 12: mod_base = OTHER; note = 2'-O-methyluridine-3'-phosphate
  modified_base 14: mod_base = OTHER; note = 2'-O-methyluridine-3'-phosphate
  modified_base 15: mod_base = OTHER; note = 2'-O-methyluridine-3'-phosphate
  modified_base 18: mod_base = OTHER; note = 2'-O-methylcytidine-3'-phosphate
  misc_feature 1..19: note = RNA
  misc_feature 20..21: note = DNA
tctataaaccgtgttagcatt

SEQ ID NO: 1300 - DNA, 21 bp, synthetic construct
  source 1..21: mol_type = other DNA; note = Description of Artificial Sequence: Synthetic oligonucleotide; note = Description of Combined DNA/RNA Molecule: Synthetic oligonucleotide
  modified_base 4: mod_base = OTHER; note = 2'-O-methyluridine-3'-phosphate
  modified_base 7: mod_base = OTHER; note = 2'-O-methylcytidine-3'-phosphate
  modified_base 14: mod_base = OTHER; note = 2'-O-methyluridine-3'-phosphate
  modified_base 16: mod_base = OTHER; note = 2'-O-methyluridine-3'-phosphate
  misc_feature 1..19: note = RNA
  misc_feature 20..21: note = DNA
tgctaacacggtttatagatt

SEQ ID NO: 1301 - DNA, 21 bp, synthetic construct
  source 1..21: mol_type = other DNA; note = Description of Artificial Sequence: Synthetic oligonucleotide; note = Description of Combined DNA/RNA Molecule: Synthetic oligonucleotide
  modified_base 3: mod_base = OTHER; note = 2'-O-methylcytidine-3'-phosphate
  modified_base 6: mod_base = OTHER; note = 2'-O-methyluridine-3'-phosphate
  modified_base 8: mod_base = OTHER; note = 2'-O-methyluridine-3'-phosphate
  modified_base 9: mod_base = OTHER; note = 2'-O-methyluridine-3'-phosphate
  modified_base 10: mod_base = OTHER; note = 2'-O-methylcytidine-3'-phosphate
  modified_base 11: mod_base = OTHER; note = 2'-O-methyluridine-3'-phosphate
  modified_base 12: mod_base = OTHER; note = 2'-O-methyluridine-3'-phosphate
  modified_base 14: mod_base = OTHER; note = 2'-O-methylcytidine-3'-phosphate
  modified_base 15: mod_base = OTHER; note = 2'-O-methyluridine-3'-phosphate
  modified_base 16: mod_base = OTHER; note = 2'-O-methylcytidine-3'-phosphate
  modified_base 17: mod_base = OTHER; note = 2'-O-methyluridine-3'-phosphate
  modified_base 19: mod_base = OTHER; note = 2'-O-methyluridine-3'-phosphate
  misc_feature 1..19: note = RNA
  misc_feature 20..21: note = DNA
aacagtgttcttgctctattt

SEQ ID NO: 1302 - DNA, 21 bp, synthetic construct
  source 1..21: mol_type = other DNA; note = Description of Artificial Sequence: Synthetic oligonucleotide; note = Description of Combined DNA/RNA Molecule: Synthetic oligonucleotide
  modified_base 2: mod_base = OTHER; note = 2'-O-methyluridine-3'-phosphate
  modified_base 7: mod_base = OTHER; note = 2'-O-methylcytidine-3'-phosphate
  modified_base 13: mod_base = OTHER; note = 2'-O-methylcytidine-3'-phosphate
  misc_feature 1..19: note = RNA
  misc_feature 20..21: note = DNA
atagagcaagaacactgtttt

SEQ ID NO: 1303 - DNA, 21 bp, synthetic construct
  source 1..21: mol_type = other DNA; note = Description of Artificial Sequence: Synthetic oligonucleotide; note = Description of Combined DNA/RNA Molecule: Synthetic oligonucleotide
  modified_base 1: mod_base = OTHER; note = 2'-O-methylcytidine-3'-phosphate
  modified_base 2: mod_base = OTHER; note = 2'-O-methyluridine-3'-phosphate
  modified_base 3: mod_base = OTHER; note = 2'-O-methylcytidine-3'-phosphate
  modified_base 4: mod_base = OTHER; note = 2'-O-methyluridine-3'-phosphate
  modified_base 7: mod_base = OTHER; note = 2'-O-methyluridine-3'-phosphate
  modified_base 10: mod_base = OTHER; note = 2'-O-methyluridine-3'-phosphate
  modified_base 11: mod_base = OTHER; note = 2'-O-methylcytidine-3'-phosphate
  modified_base 16: mod_base = OTHER; note = 2'-O-methyluridine-3'-phosphate
  modified_base 17: mod_base = OTHER; note = 2'-O-methylcytidine-3'-phosphate
  modified_base 18: mod_base = OTHER; note = 2'-O-methylcytidine-3'-phosphate
  modified_base 19: mod_base = OTHER; note = 2'-O-methyluridine-3'-phosphate
  misc_feature 1..19: note = RNA
  misc_feature 20..21: note = DNA
ctctgatggtcaaagtccttt

SEQ ID NO: 1304 - DNA, 21 bp, synthetic construct
  source 1..21: mol_type = other DNA; note = Description of Artificial Sequence: Synthetic oligonucleotide; note = Description of Combined DNA/RNA Molecule: Synthetic oligonucleotide
  modified_base 12: mod_base = OTHER; note = 2'-O-methylcytidine-3'-phosphate
  modified_base 15: mod_base = OTHER; note = 2'-O-methylcytidine-3'-phosphate
  misc_feature 1..19: note = RNA
  misc_feature 20..21: note = DNA
aggactttgaccatcagagtt

SEQ ID NO: 1305 - DNA, 21 bp, synthetic construct
  source 1..21: mol_type = other DNA; note = Description of Artificial Sequence: Synthetic oligonucleotide; note = Description of Combined DNA/RNA Molecule: Synthetic oligonucleotide
  modified_base 1: mod_base = OTHER; note = 2'-O-methyluridine-3'-phosphate
  modified_base 3: mod_base = OTHER; note = 2'-O-methylcytidine-3'-phosphate
  modified_base 4: mod_base = OTHER; note = 2'-O-methyluridine-3'-phosphate
  modified_base 6: mod_base = OTHER; note = 2'-O-methyluridine-3'-phosphate
  modified_base 7: mod_base = OTHER; note = 2'-O-methylcytidine-3'-phosphate
  modified_base 8: mod_base = OTHER; note = 2'-O-methylcytidine-3'-phosphate
  modified_base 13: mod_base = OTHER; note = 2'-O-methylcytidine-3'-phosphate
  modified_base 16: mod_base = OTHER; note = 2'-O-methylcytidine-3'-phosphate
  modified_base 17: mod_base = OTHER; note = 2'-O-methylcytidine-3'-phosphate
  modified_base 18: mod_base = OTHER; note = 2'-O-methylcytidine-3'-phosphate
  modified_base 19: mod_base = OTHER; note = 2'-O-methyluridine-3'-phosphate
  misc_feature 1..19: note = RNA
  misc_feature 20..21: note = DNA
tgctgtccgaggcagcccttt

SEQ ID NO: 1306 - DNA, 21 bp, synthetic construct
  source 1..21: mol_type = other DNA; note = Description of Artificial Sequence: Synthetic oligonucleotide; note = Description of Combined DNA/RNA Molecule: Synthetic oligonucleotide
  modified_base 15: mod_base = OTHER; note = 2'-O-methylcytidine-3'-phosphate
  modified_base 18: mod_base = OTHER; note = 2'-O-methylcytidine-3'-phosphate
  misc_feature 1..19: note = RNA
  misc_feature 20..21: note = DNA
agggctgcctcggacagcatt

SEQ ID NO: 1307 - DNA, 21 bp, synthetic construct
  source 1..21: mol_type = other DNA; note = Description of Artificial Sequence: Synthetic oligonucleotide; note = Description of Combined DNA/RNA Molecule: Synthetic oligonucleotide
  modified_base 2: mod_base = OTHER; note = 2'-O-methyluridine-3'-phosphate
  modified_base 3: mod_base = OTHER; note = 2'-O-methylcytidine-3'-phosphate
  modified_base 4: mod_base = OTHER; note = 2'-O-methyluridine-3'-phosphate
  modified_base 11: mod_base = OTHER; note = 2'-O-methylcytidine-3'-phosphate
  modified_base 12: mod_base = OTHER; note = 2'-O-methyluridine-3'-phosphate
  modified_base 14: mod_base = OTHER; note = 2'-O-methylcytidine-3'-phosphate
  modified_base 16: mod_base = OTHER; note = 2'-O-methylcytidine-3'-phosphate
  misc_feature 1..19: note = RNA
  misc_feature 20..21: note = DNA
gtctggagagctgcacgggtt

SEQ ID NO: 1308 - DNA, 21 bp, synthetic construct
  source 1..21: mol_type = other DNA; note = Description of Artificial Sequence: Synthetic oligonucleotide; note = Description of Combined DNA/RNA Molecule: Synthetic oligonucleotide
  modified_base 7: mod_base = OTHER; note = 2'-O-methylcytidine-3'-phosphate
  modified_base 15: mod_base = OTHER; note = 2'-O-methylcytidine-3'-phosphate
  misc_feature 1..19: note = RNA
  misc_feature 20..21: note = DNA
cccgtgcagctctccagactt

SEQ ID NO: 1309 - DNA, 21 bp, synthetic construct
  source 1..21: mol_type = other DNA; note = Description of Artificial Sequence: Synthetic oligonucleotide; note = Description of Combined DNA/RNA Molecule: Synthetic oligonucleotide
  modified_base 2: mod_base = OTHER; note = 2'-O-methylcytidine-3'-phosphate
  modified_base 5: mod_base = OTHER; note = 2'-O-methyluridine-3'-phosphate
  modified_base 7: mod_base = OTHER; note = 2'-O-methyluridine-3'-phosphate
  modified_base 8: mod_base = OTHER; note = 2'-O-methyluridine-3'-phosphate
  modified_base 9: mod_base = OTHER; note = 2'-O-methylcytidine-3'-phosphate
  modified_base 10: mod_base = OTHER; note = 2'-O-methyluridine-3'-phosphate
  modified_base 11: mod_base = OTHER; note = 2'-O-methyluridine-3'-phosphate
  modified_base 13: mod_base = OTHER; note = 2'-O-methylcytidine-3'-phosphate
  modified_base 14: mod_base = OTHER; note = 2'-O-methyluridine-3'-phosphate
  modified_base 15: mod_base = OTHER; note = 2'-O-methylcytidine-3'-phosphate
  modified_base 16: mod_base = OTHER; note = 2'-O-methyluridine-3'-phosphate
  modified_base 18: mod_base = OTHER; note = 2'-O-methyluridine-3'-phosphate
  misc_feature 1..19: note = RNA
  misc_feature 20..21: note = DNA
acagtgttcttgctctatatt

SEQ ID NO: 1310 - DNA, 21 bp, synthetic construct
  source 1..21: mol_type = other DNA; note = Description of Artificial Sequence: Synthetic oligonucleotide; note = Description of Combined DNA/RNA Molecule: Synthetic oligonucleotide
  modified_base 1: mod_base = OTHER; note = 2'-O-methyluridine-3'-phosphate
  modified_base 3: mod_base = OTHER; note = 2'-O-methyluridine-3'-phosphate
  modified_base 8: mod_base = OTHER; note = 2'-O-methylcytidine-3'-phosphate
  modified_base 14: mod_base = OTHER; note = 2'-O-methylcytidine-3'-phosphate
  misc_feature 1..19: note = RNA
  misc_feature 20..21: note = DNA
tatagagcaagaacactgttt

SEQ ID NO: 1311 - DNA, 21 bp, synthetic construct
  source 1..21: mol_type = other DNA; note = Description of Artificial Sequence: Synthetic oligonucleotide; note = Description of Combined DNA/RNA Molecule: Synthetic oligonucleotide
  modified_base 1: mod_base = OTHER; note = 2'-O-methylcytidine-3'-phosphate
  modified_base 2: mod_base = OTHER; note = 2'-O-methylcytidine-3'-phosphate
  modified_base 3: mod_base = OTHER; note = 2'-O-methyluridine-3'-phosphate
  modified_base 4: mod_base = OTHER; note = 2'-O-methylcytidine-3'-phosphate
  modified_base 5: mod_base = OTHER; note = 2'-O-methyluridine-3'-phosphate
  modified_base 8: mod_base = OTHER; note = 2'-O-methyluridine-3'-phosphate
  modified_base 11: mod_base = OTHER; note = 2'-O-methyluridine-3'-phosphate
  modified_base 12: mod_base = OTHER; note = 2'-O-methylcytidine-3'-phosphate
  modified_base 17: mod_base = OTHER; note = 2'-O-methyluridine-3'-phosphate
  modified_base 18: mod_base = OTHER; note = 2'-O-methylcytidine-3'-phosphate
  modified_base 19: mod_base = OTHER; note = 2'-O-methylcytidine-3'-phosphate
  misc_feature 1..19: note = RNA
  misc_feature 20..21: note = DNA
cctctgatggtcaaagtcctt

SEQ ID NO: 1312 - DNA, 21 bp, synthetic construct
  source 1..21: mol_type = other DNA; note = Description of Artificial Sequence: Synthetic oligonucleotide; note = Description of Combined DNA/RNA Molecule: Synthetic oligonucleotide
  modified_base 11: mod_base = OTHER; note = 2'-O-methylcytidine-3'-phosphate
  modified_base 14: mod_base = OTHER; note = 2'-O-methylcytidine-3'-phosphate
  misc_feature 1..19: note = RNA
  misc_feature 20..21: note = DNA
ggactttgaccatcagaggtt

SEQ ID NO: 1313 - DNA, 21 bp, synthetic construct
  source 1..21: mol_type = other DNA; note = Description of Artificial Sequence: Synthetic oligonucleotide; note = Description of Combined DNA/RNA Molecule: Synthetic oligonucleotide
  modified_base 3: mod_base = OTHER; note = 2'-O-methyluridine-3'-phosphate
  modified_base 4: mod_base = OTHER; note = 2'-O-methylcytidine-3'-phosphate
  modified_base 5: mod_base = OTHER; note = 2'-O-methylcytidine-3'-phosphate
  modified_base 6: mod_base = OTHER; note = 2'-O-methyluridine-3'-phosphate
  modified_base 10: mod_base = OTHER; note = 2'-O-methyluridine-3'-phosphate
  modified_base 12: mod_base = OTHER; note = 2'-O-methylcytidine-3'-phosphate
  modified_base 13: mod_base = OTHER; note = 2'-O-methyluridine-3'-phosphate
  modified_base 15: mod_base = OTHER; note = 2'-O-methyluridine-3'-phosphate
  modified_base 16: mod_base = OTHER; note = 2'-O-methylcytidine-3'-phosphate
  modified_base 17: mod_base = OTHER; note = 2'-O-methylcytidine-3'-phosphate
  misc_feature 1..19: note = RNA
  misc_feature 20..21: note = DNA
agtcctggatgctgtccgatt

SEQ ID NO: 1314 - DNA, 21 bp, synthetic construct
  source 1..21: mol_type = other DNA; note = Description of Artificial Sequence: Synthetic oligonucleotide; note = Description of Combined DNA/RNA Molecule: Synthetic oligonucleotide
  modified_base 6: mod_base = OTHER; note = 2'-O-methylcytidine-3'-phosphate
  modified_base 9: mod_base = OTHER; note = 2'-O-methylcytidine-3'-phosphate
  modified_base 13: mod_base = OTHER; note = 2'-O-methylcytidine-3'-phosphate
  misc_feature 1..19: note = RNA
  misc_feature 20..21: note = DNA
tcggacagcatccaggacttt

SEQ ID NO: 1315 - DNA, 21 bp, synthetic construct
  source 1..21: mol_type = other DNA; note = Description of Artificial Sequence: Synthetic oligonucleotide; note = Description of Combined DNA/RNA Molecule: Synthetic oligonucleotide
  modified_base 1: mod_base = OTHER; note = 2'-O-methyluridine-3'-phosphate
  modified_base 2: mod_base = OTHER; note = 2'-O-methyluridine-3'-phosphate
  modified_base 4: mod_base = OTHER; note = 2'-O-methylcytidine-3'-phosphate
  modified_base 5: mod_base = OTHER; note = 2'-O-methylcytidine-3'-phosphate
  modified_base 6: mod_base = OTHER; note = 2'-O-methyluridine-3'-phosphate
  modified_base 7: mod_base = OTHER; note = 2'-O-methylcytidine-3'-phosphate
  modified_base 8: mod_base = OTHER; note = 2'-O-methyluridine-3'-phosphate
  modified_base 16: mod_base = OTHER; note = 2'-O-methylcytidine-3'-phosphate
  modified_base 17: mod_base = OTHER; note = 2'-O-methylcytidine-3'-phosphate
  modified_base 19: mod_base = OTHER; note = 2'-O-methylcytidine-3'-phosphate
  misc_feature 1..19: note = RNA
  misc_feature 20..21: note = DNA
ttgcctctgggaagaccgctt

SEQ ID NO: 1316 - DNA, 21 bp, synthetic construct
  source 1..21: mol_type = other DNA; note = Description of Artificial Sequence: Synthetic oligonucleotide; note = Description of Combined DNA/RNA Molecule: Synthetic oligonucleotide
  modified_base 11: mod_base = OTHER; note = 2'-O-methylcytidine-3'-phosphate
  modified_base 17: mod_base = OTHER; note = 2'-O-methylcytidine-3'-phosphate
  misc_feature 1..19: note = RNA
  misc_feature 20..21: note = DNA
gcggtcttcccagaggcaatt

SEQ ID NO: 1317 - DNA, 21 bp, synthetic construct
  source 1..21: mol_type = other DNA; note = Description of Artificial Sequence: Synthetic oligonucleotide; note = Description of Combined DNA/RNA Molecule: Synthetic oligonucleotide
  modified_base 1: mod_base = OTHER; note = 2'-O-methyluridine-3'-phosphate
  modified_base 8: mod_base = OTHER; note = 2'-O-methylcytidine-3'-phosphate
  modified_base 9: mod_base = OTHER; note = 2'-O-methyluridine-3'-phosphate
  modified_base 11: mod_base = OTHER; note = 2'-O-methylcytidine-3'-phosphate
  modified_base 13: mod_base = OTHER; note = 2'-O-methylcytidine-3'-phosphate
  modified_base 17: mod_base = OTHER; note = 2'-O-methylcytidine-3'-phosphate
  modified_base 18: mod_base = OTHER; note = 2'-O-methyluridine-3'-phosphate
  modified_base 19: mod_base = OTHER; note = 2'-O-methylcytidine-3'-phosphate
  misc_feature 1..19: note = RNA
  misc_feature 20..21: note = DNA
tggagagctgcacgggctctt

SEQ ID NO: 1318 - DNA, 21 bp, synthetic construct
  source 1..21: mol_type = other DNA; note = Description of Artificial Sequence: Synthetic oligonucleotide; note = Description of Combined DNA/RNA Molecule: Synthetic oligonucleotide
  modified_base 10: mod_base = OTHER; note = 2'-O-methylcytidine-3'-phosphate
  modified_base 18: mod_base = OTHER; note = 2'-O-methylcytidine-3'-phosphate
  misc_feature 1..19: note = RNA
  misc_feature 20..21: note = DNA
gagcccgtgcagctctccatt

SEQ ID NO: 1319 - DNA, 21 bp, synthetic construct
  source 1..21: mol_type = other DNA; note = Description of Artificial Sequence: Synthetic oligonucleotide; note = Description of Combined DNA/RNA Molecule: Synthetic oligonucleotide
  modified_base 6: mod_base = OTHER; note = 2'-O-methylcytidine-3'-phosphate
  modified_base 7: mod_base = OTHER; note = 2'-O-methyluridine-3'-phosphate
  modified_base 9: mod_base = OTHER; note = 2'-O-methylcytidine-3'-phosphate
  modified_base 11: mod_base = OTHER; note = 2'-O-methylcytidine-3'-phosphate
  modified_base 15: mod_base = OTHER; note = 2'-O-methylcytidine-3'-phosphate
  modified_base 16: mod_base = OTHER; note = 2'-O-methyluridine-3'-phosphate
  modified_base 17: mod_base = OTHER; note = 2'-O-methylcytidine-3'-phosphate
  modified_base 19: mod_base = OTHER; note = 2'-O-methylcytidine-3'-phosphate
  misc_feature 1..19: note = RNA
  misc_feature 20..21: note = DNA
gagagctgcacgggctcactt

SEQ ID NO: 1320 - DNA, 21 bp, synthetic construct
  source 1..21: mol_type = other DNA; note = Description of Artificial Sequence: Synthetic oligonucleotide; note = Description of Combined DNA/RNA Molecule: Synthetic oligonucleotide
  modified_base 12: mod_base = OTHER; note = 2'-O-methylcytidine-3'-phosphate
  misc_feature 1..19: note = RNA
  misc_feature 20..21: note = DNA
gtgagcccgtgcagctctctt

SEQ ID NO: 1321 - DNA, 21 bp, synthetic construct
  source 1..21: mol_type = other DNA; note = Description of Artificial Sequence: Synthetic oligonucleotide; note = Description of Combined DNA/RNA Molecule: Synthetic oligonucleotide
  modified_base 4: mod_base = OTHER; note = 2'-O-methylcytidine-3'-phosphate
  modified_base 5: mod_base = OTHER; note = 2'-O-methyluridine-3'-phosphate
  modified_base 7: mod_base = OTHER; note = 2'-O-methylcytidine-3'-phosphate
  modified_base 9: mod_base = OTHER; note = 2'-O-methylcytidine-3'-phosphate
  modified_base 13: mod_base = OTHER; note = 2'-O-methylcytidine-3'-phosphate
  modified_base 14: mod_base = OTHER; note = 2'-O-methyluridine-3'-phosphate
  modified_base 15: mod_base = OTHER; note = 2'-O-methylcytidine-3'-phosphate
  modified_base 17: mod_base = OTHER; note = 2'-O-methylcytidine-3'-phosphate
  modified_base 18: mod_base = OTHER; note = 2'-O-methylcytidine-3'-phosphate
  misc_feature 1..19: note = RNA
  misc_feature 20..21: note = DNA
gagctgcacgggctcaccatt

SEQ ID NO: 1322 - DNA, 21 bp, synthetic construct
  source 1..21: mol_type = other DNA; note = Description of Artificial Sequence: Synthetic oligonucleotide; note = Description of Combined DNA/RNA Molecule: Synthetic oligonucleotide
  modified_base 14: mod_base = OTHER; note = 2'-O-methylcytidine-3'-phosphate
  misc_feature 1..19: note = RNA
  misc_feature 20..21: note = DNA
tggtgagcccgtgcagctctt

SEQ ID NO: 1323 - DNA, 21 bp, synthetic construct
  source 1..21: mol_type = other DNA; note = Description of Artificial Sequence: Synthetic oligonucleotide; note = Description of Combined DNA/RNA Molecule: Synthetic oligonucleotide
  modified_base 1: mod_base = OTHER; note = 2'-O-methyluridine-3'-phosphate
  modified_base 3: mod_base = OTHER; note = 2'-O-methylcytidine-3'-phosphate
  modified_base 5: mod_base = OTHER; note = 2'-O-methylcytidine-3'-phosphate
  modified_base 6: mod_base = OTHER; note = 2'-O-methylcytidine-3'-phosphate
  modified_base 8: mod_base = OTHER; note = 2'-O-methyluridine-3'-phosphate
  modified_base 9: mod_base = OTHER; note = 2'-O-methylcytidine-3'-phosphate
  modified_base 11: mod_base = OTHER; note = 2'-O-methylcytidine-3'-phosphate
  modified_base 14: mod_base = OTHER; note = 2'-O-methylcytidine-3'-phosphate
  modified_base 15: mod_base = OTHER; note = 2'-O-methylcytidine-3'-phosphate
  modified_base 16: mod_base = OTHER; note = 2'-O-methylcytidine-3'-phosphate
  modified_base 17: mod_base = OTHER; note = 2'-O-methyluridine-3'-phosphate
  modified_base 19: mod_base = OTHER; note = 2'-O-methylcytidine-3'-phosphate
  misc_feature 1..19: note = RNA
  misc_feature 20..21: note = DNA
tacaccatcgcagccctgctt

SEQ ID NO: 1324 - DNA, 21 bp, synthetic construct
  source 1..21: mol_type = other DNA; note = Description of Artificial Sequence: Synthetic oligonucleotide; note = Description of Combined DNA/RNA Molecule: Synthetic oligonucleotide
  modified_base 2: mod_base = OTHER; note = 2'-O-methylcytidine-3'-phosphate
  modified_base 18: mod_base = OTHER; note = 2'-O-methyluridine-3'-phosphate
  misc_feature 1..19: note = RNA
  misc_feature 20..21: note = DNA
gcagggctgcgatggtgtatt

SEQ ID NO: 1325 - DNA, 21 bp, synthetic construct
  source 1..21: mol_type = other DNA; note = Description of Artificial Sequence: Synthetic oligonucleotide; note = Description of Combined DNA/RNA Molecule: Synthetic oligonucleotide
  modified_base 2: mod_base = OTHER; note = 2'-O-methyluridine-3'-phosphate
  modified_base 3: mod_base = OTHER; note = 2'-O-methylcytidine-3'-phosphate
  modified_base 4: mod_base = OTHER; note = 2'-O-methylcytidine-3'-phosphate
  modified_base 5: mod_base = OTHER; note = 2'-O-methyluridine-3'-phosphate
  modified_base 9: mod_base = OTHER; note = 2'-O-methyluridine-3'-phosphate
  modified_base 11: mod_base = OTHER; note = 2'-O-methylcytidine-3'-phosphate
  modified_base 12: mod_base = OTHER; note = 2'-O-methyluridine-3'-phosphate
  modified_base 14: mod_base = OTHER; note = 2'-O-methyluridine-3'-phosphate
  modified_base 15: mod_base = OTHER; note = 2'-O-methylcytidine-3'-phosphate
  modified_base 16: mod_base = OTHER; note = 2'-O-methylcytidine-3'-phosphate
  misc_feature 1..19: note = RNA
  misc_feature 20..21: note = DNA
gtcctggatgctgtccgagtt

SEQ ID NO: 1326 - DNA, 21 bp, synthetic construct
  source 1..21: mol_type = other DNA; note = Description of Artificial Sequence: Synthetic oligonucleotide; note = Description of Combined DNA/RNA Molecule: Synthetic oligonucleotide
  modified_base 7: mod_base = OTHER; note = 2'-O-methylcytidine-3'-phosphate
  modified_base 10: mod_base = OTHER; note = 2'-O-methylcytidine-3'-phosphate
  modified_base 14: mod_base = OTHER; note = 2'-O-methylcytidine-3'-phosphate
  misc_feature 1..19: note = RNA
  misc_feature 20..21: note = DNA
ctcggacagcatccaggactt

SEQ ID NO: 1327 - DNA, 21 bp, synthetic construct
  source 1..21: mol_type = other DNA; note = Description of Artificial Sequence: Synthetic oligonucleotide; note = Description of Combined DNA/RNA Molecule: Synthetic oligonucleotide
  modified_base 5: mod_base = OTHER; note = 2'-O-methylcytidine-3'-phosphate
  modified_base 6: mod_base = OTHER; note = 2'-O-methyluridine-3'-phosphate
  modified_base 8: mod_base = OTHER; note = 2'-O-methylcytidine-3'-phosphate
  modified_base 10: mod_base = OTHER; note = 2'-O-methylcytidine-3'-phosphate
  modified_base 14: mod_base = OTHER; note = 2'-O-methylcytidine-3'-phosphate
  modified_base 15: mod_base = OTHER; note = 2'-O-methyluridine-3'-phosphate
  modified_base 16: mod_base = OTHER; note = 2'-O-methylcytidine-3'-phosphate
  modified_base 18: mod_base = OTHER; note = 2'-O-methylcytidine-3'-phosphate
  modified_base 19: mod_base = OTHER; note = 2'-O-methylcytidine-3'-phosphate
  misc_feature 1..19: note = RNA
  misc_feature 20..21: note = DNA
agagctgcacgggctcacctt

SEQ ID NO: 1328 - DNA, 21 bp, synthetic construct
  source 1..21: mol_type = other DNA; note = Description of Artificial Sequence: Synthetic oligonucleotide; note = Description of Combined DNA/RNA Molecule: Synthetic oligonucleotide
  modified_base 13: mod_base = OTHER; note = 2'-O-methylcytidine-3'-phosphate
  misc_feature 1..19: note = RNA
  misc_feature 20..21: note = DNA
ggtgagcccgtgcagctcttt

SEQ ID NO: 1329 - DNA, 650 bp, synthetic construct
  source 1..650: mol_type = other DNA; note = Description of Artificial Sequence: Synthetic polynucleotide; note = Description of Combined DNA/RNA Molecule: Synthetic polynucleotide
acagaagtccactcattcttggcaggatggcttctcatcgtctgctcctcctctgccttgctggactggtatttgtgtctgaggctggccctacgggcaccggtgaatccaagtgtcctctgatggtcaaagttctagatgctgtccgaggcagtcctgccatcaatgtggccgtgcatgtgttcagaaaggctgctgatgacacctgggagccatttgcctctgggaaaaccagtgagtctggagagctgcatgggctcacaactgaggaggaatttgtagaagggatatacaaagtggaaatagacaccaaatcttactggaaggcacttggcatctccccattccatgagcatgcagaggtggtattcacagccaacgactccggcccccgccgctacaccattgccgccctgctgagcccctactcctattccaccacggctgtcgtcaccaatcccaaggaatgagggacttctcctccagtggacctgaaggacgagggatgggatttcatgtaaccaagagtattccatttttactaaagcagtgttttcacctcatatgctatgttagaagtccaggcagagacaataaaacattcctgtgaaaggcacttttcattccaaaaaaaaaaaaaaaaaaaaaaa

SEQ ID NO: 1330 - DNA, 595 bp, synthetic construct
  source 1..595: mol_type = other DNA; note = Description of Artificial Sequence: Synthetic polynucleotide
cctgacaggatggcttcccttcgcctgttcctcctctgcctcgctggactgatatttgcgtctgaagctggccctgggggtgctggagaatccaagtgtcctctgatggtcaaagtcctggatgctgtccgaggcagccctgctgtcgatgtggccgtgaaagtgttcaaaaggactgcagacggaagctgggagccgtttgcctctgggaagaccgccgagtctggagagctgcacgggctcaccacagatgagaagttcacggaaggggtgtacagggtagaactggacaccaaatcatactggaaggctcttggcatttccccattccatgaatacgcagaggtggttttcacagccaatgactctggtcatcgccactacaccatcgcagccctgctcagcccgtactcctacagcaccactgctgtcgtcagtaacccccagaactgagggacccagcccacgaggaccaagatcttgccaaagcagtagctcccatttgtactgaaacagtgttcttgctctataaaccgtgttagcaactcgggaagatgccgtgaaacgttcttattaaaccacctttatttcattc

SEQ ID NO: 1331 - DNA, 938 bp, synthetic construct
  source 1..938: mol_type = other DNA; note = Description of Artificial Sequence: Synthetic polynucleotide
gttgactaagtcaataatcagaatcagcaggtttgcagtcagattggcagggataagcagcctagctcaggagaagtgagtataaaagccccaggctgggagcagccatcacagaagtccactcattcttggcaggatggcttctcatcgtctgctcctcctctgccttgctggactggtatttgtgtctgaggctggccctacgggcaccggtgaatccaagtgtcctctgatggtcaaagttctagatgctgtccgaggcagtcctgccatcaatgtggccgtgcatgtgttcagaaaggctgctgatgacacctgggagccatttgcctctgggaaaaccagtgagtctggagagctgcatgggctcacaactgaggaggaatttgtagaagggatatacaaagtggaaatagacaccaaatcttactggaaggcacttggcatctccccattccatgagcatgcagaggtggtattcacagccaacgactccggcccccgccgctacaccattgccgccctgctgagcccctactcctattccaccacggctgtcgtcaccaatcccaaggaatgagggacttctcctccagtggacctgaaggacgagggatgggatttcatgtaaccaagagtattccatttttactaaagcagtgttttcacctcatatgctatgttagaagtccaggcagagacaataaaacattcctgtgaaaggcacttttcattccactttaacttgattttttaaattcccttattgtcccttccaaaaaaaagagaatcaaaattttacaaagaatcaaaggaattctagaaagtatctgggcagaacgctaggagagatccaaatttccattgtcttgcaagcaaagcacgtattaaatatgatctgcagccattaaaaagacacattctgtaaaaaaaaaaaa

SEQ ID NO: 1332 - DNA, 21 bp, synthetic construct
  source 1..21: mol_type = other DNA; note = Description of Artificial Sequence: Synthetic oligonucleotide; note = Description of Combined DNA/RNA Molecule: Synthetic oligonucleotide
  modified_base 5: mod_base = OTHER; note = 2'-O-methyluridine-3'-phosphate
  modified_base 6: mod_base = OTHER; note = 2'-O-methyluridine-3'-phosphate
  modified_base 7: mod_base = OTHER; note = 2'-O-methyluridine-3'-phosphate
  modified_base 8: mod_base = OTHER; note = 2'-O-methylcytidine-3'-phosphate
  modified_base 10: mod_base = OTHER; note = 2'-O-methyluridine-3'-phosphate
  modified_base 12: mod_base = OTHER; note = 2'-O-methyluridine-3'-phosphate
  modified_base 15: mod_base = OTHER; note = 2'-O-methylcytidine-3'-phosphate
  modified_base 16: mod_base = OTHER; note = 2'-O-methylcytidine-3'-phosphate
  misc_feature 1..19: note = RNA
  misc_feature 20..21: note = DNA
gggatttcatgtaaccaagtt

SEQ ID NO: 1333 - DNA, 21 bp, synthetic construct
  source 1..21: mol_type = other DNA; note = Description of Artificial Sequence: Synthetic oligonucleotide; note = Description of Combined DNA/RNA Molecule: Synthetic oligonucleotide
  modified_base 7: mod_base = OTHER; note = 2'-O-methyluridine-3'-phosphate
  modified_base 9: mod_base = OTHER; note = 2'-O-methylcytidine-3'-phosphate
  misc_feature 1..19: note = RNA
  misc_feature 20..21: note = DNA
cttggttacatgaaatccctt

SEQ ID NO: 1334 - DNA, 21 bp, synthetic construct
  source 1..21: mol_type = other DNA; note = Description of Artificial Sequence: Synthetic oligonucleotide; note = Description of Combined DNA/RNA Molecule: Synthetic oligonucleotide
  modified_base 4: mod_base = OTHER; note = 2'-O-methyluridine-3'-phosphate
  modified_base 5: mod_base = OTHER; note = 2'-O-methyluridine-3'-phosphate
  modified_base 6: mod_base = OTHER; note = 2'-O-methyluridine-3'-phosphate
  modified_base 7: mod_base = OTHER; note = 2'-O-methylcytidine-3'-phosphate
  modified_base 9: mod_base = OTHER; note = 2'-O-methyluridine-3'-phosphate
  modified_base 11: mod_base = OTHER; note = 2'-O-methyluridine-3'-phosphate
  modified_base 14: mod_base = OTHER; note = 2'-O-methylcytidine-3'-phosphate
  modified_base 15: mod_base = OTHER; note = 2'-O-methylcytidine-3'-phosphate
  misc_feature 1..19: note = RNA
  misc_feature 20..21: note = DNA
ggatttcatgtaaccaagatt

SEQ ID NO: 1335 - DNA, 21 bp, synthetic construct
  source 1..21: mol_type = other DNA; note = Description of Artificial Sequence: Synthetic oligonucleotide; note = Description of Combined DNA/RNA Molecule: Synthetic oligonucleotide
  modified_base 8: mod_base = OTHER; note = 2'-O-methyluridine-3'-phosphate
  modified_base 10: mod_base = OTHER; note = 2'-O-methylcytidine-3'-phosphate
  misc_feature 1..19: note = RNA
  misc_feature 20..21: note = DNA
tcttggttacatgaaatcctt

SEQ ID NO: 1336 - DNA, 21 bp, synthetic construct
  source 1..21: mol_type = other DNA; note = Description of Artificial Sequence: Synthetic oligonucleotide; note = Description of Combined DNA/RNA Molecule: Synthetic oligonucleotide
  modified_base 3: mod_base = OTHER; note = 2'-O-methyluridine-3'-phosphate
  modified_base 4: mod_base = OTHER; note = 2'-O-methyluridine-3'-phosphate
  modified_base 5: mod_base = OTHER; note = 2'-O-methyluridine-3'-phosphate
  modified_base 6: mod_base = OTHER; note = 2'-O-methylcytidine-3'-phosphate
  modified_base 8: mod_base = OTHER; note = 2'-O-methyluridine-3'-phosphate
  modified_base 10: mod_base = OTHER; note = 2'-O-methyluridine-3'-phosphate
  modified_base 13: mod_base = OTHER; note = 2'-O-methylcytidine-3'-phosphate
  modified_base 14: mod_base = OTHER; note = 2'-O-methylcytidine-3'-phosphate
  misc_feature 1..19: note = RNA
  misc_feature 20..21: note = DNA
gatttcatgtaaccaagagtt

SEQ ID NO: 1337 - DNA, 21 bp, synthetic construct
  source 1..21: mol_type = other DNA; note = Description of Artificial Sequence: Synthetic oligonucleotide; note = Description of Combined DNA/RNA Molecule: Synthetic oligonucleotide
  modified_base 9: mod_base = OTHER; note = 2'-O-methyluridine-3'-phosphate
  modified_base 11: mod_base = OTHER; note = 2'-O-methylcytidine-3'-phosphate
  misc_feature 1..19: note = RNA
  misc_feature 20..21: note = DNA
ctcttggttacatgaaatctt

SEQ ID NO: 1338 - DNA, 21 bp, synthetic construct
  source 1..21: mol_type = other DNA; note = Description of Artificial Sequence: Synthetic oligonucleotide; note = Description of Combined DNA/RNA Molecule: Synthetic oligonucleotide
  modified_base 2: mod_base = OTHER; note = 2'-O-methyluridine-3'-phosphate
  modified_base 3: mod_base = OTHER; note = 2'-O-methyluridine-3'-phosphate
  modified_base 4: mod_base = OTHER; note = 2'-O-methyluridine-3'-phosphate
  modified_base 5: mod_base = OTHER; note = 2'-O-methylcytidine-3'-phosphate
  modified_base 7: mod_base = OTHER; note = 2'-O-methyluridine-3'-phosphate
  modified_base 9: mod_base = OTHER; note = 2'-O-methyluridine-3'-phosphate
  modified_base 12: mod_base = OTHER; note = 2'-O-methylcytidine-3'-phosphate
  modified_base 13: mod_base = OTHER; note = 2'-O-methylcytidine-3'-phosphate
  modified_base 19: mod_base = OTHER; note = 2'-O-methyluridine-3'-phosphate
  misc_feature 1..19: note = RNA
  misc_feature 20..21: note = DNA
atttcatgtaaccaagagttt

SEQ ID NO: 1339 - DNA, 21 bp, synthetic construct
  source 1..21: mol_type = other DNA; note = Description of Artificial Sequence: Synthetic oligonucleotide; note = Description of Combined DNA/RNA Molecule: Synthetic oligonucleotide
  modified_base 10: mod_base = OTHER; note = 2'-O-methyluridine-3'-phosphate
  modified_base 12: mod_base = OTHER; note = 2'-O-methylcytidine-3'-phosphate
  misc_feature 1..19: note = RNA
  misc_feature 20..21: note = DNA
actcttggttacatgaaattt

SEQ ID NO: 1340 - DNA, 21 bp, synthetic construct
  source 1..21: mol_type = other DNA; note = Description of Artificial Sequence: Synthetic oligonucleotide; note = Description of Combined DNA/RNA Molecule: Synthetic oligonucleotide
  modified_base 1: mod_base = OTHER; note = 2'-O-methyluridine-3'-phosphate
  modified_base 2: mod_base = OTHER; note = 2'-O-methyluridine-3'-phosphate
  modified_base 3: mod_base = OTHER; note = 2'-O-methyluridine-3'-phosphate
  modified_base 4: mod_base = OTHER; note = 2'-O-methylcytidine-3'-phosphate
  modified_base 6: mod_base = OTHER; note = 2'-O-methyluridine-3'-phosphate
  modified_base 8: mod_base = OTHER; note = 2'-O-methyluridine-3'-phosphate
  modified_base 11: mod_base = OTHER; note = 2'-O-methylcytidine-3'-phosphate
  modified_base 12: mod_base = OTHER; note = 2'-O-methylcytidine-3'-phosphate
  modified_base 18: mod_base = OTHER; note = 2'-O-methyluridine-3'-phosphate
  misc_feature 1..19: note = RNA
  misc_feature 20..21: note = DNA
tttcatgtaaccaagagtatt

SEQ ID NO: 1341 - DNA, 21 bp, synthetic construct
  source 1..21: mol_type = other DNA; note = Description of Artificial Sequence: Synthetic oligonucleotide; note = Description of Combined DNA/RNA Molecule: Synthetic oligonucleotide
  modified_base 1: mod_base = OTHER; note = 2'-O-methyluridine-3'-phosphate
  modified_base 11: mod_base = OTHER; note = 2'-O-methyluridine-3'-phosphate
  modified_base 13: mod_base = OTHER; note = 2'-O-methylcytidine-3'-phosphate
  misc_feature 1..19: note = RNA
  misc_feature 20..21: note = DNA
tactcttggttacatgaaatt

SEQ ID NO: 1342 - DNA, 21 bp, synthetic construct
  source 1..21: mol_type = other DNA; note = Description of Artificial Sequence: Synthetic oligonucleotide; note = Description of Combined DNA/RNA Molecule: Synthetic oligonucleotide
  modified_base 1: mod_base = OTHER; note = 2'-O-methyluridine-3'-phosphate
  modified_base 2: mod_base = OTHER; note = 2'-O-methyluridine-3'-phosphate
  modified_base 3: mod_base = OTHER; note = 2'-O-methylcytidine-3'-phosphate
  modified_base 5: mod_base = OTHER; note = 2'-O-methyluridine-3'-phosphate
  modified_base 7: mod_base = OTHER; note = 2'-O-methyluridine-3'-phosphate
  modified_base 10: mod_base = OTHER; note = 2'-O-methylcytidine-3'-phosphate
  modified_base 11: mod_base = OTHER; note = 2'-O-methylcytidine-3'-phosphate
  modified_base 17: mod_base = OTHER; note = 2'-O-methyluridine-3'-phosphate
  modified_base 19: mod_base = OTHER; note = 2'-O-methyluridine-3'-phosphate
  misc_feature 1..19: note = RNA
  misc_feature 20..21: note = DNA
ttcatgtaaccaagagtattt

SEQ ID NO: 1343 - DNA, 21 bp, synthetic construct
  source 1..21: mol_type = other DNA; note = Description of Artificial Sequence: Synthetic oligonucleotide; note = Description of Combined DNA/RNA Molecule: Synthetic oligonucleotide
  modified_base 2: mod_base = OTHER; note = 2'-O-methyluridine-3'-phosphate
  modified_base 12: mod_base = OTHER; note = 2'-O-methyluridine-3'-phosphate
  modified_base 14: mod_base = OTHER; note = 2'-O-methylcytidine-3'-phosphate
  misc_feature 1..19: note = RNA
  misc_feature 20..21: note = DNA
atactcttggttacatgaatt

SEQ ID NO: 1344 - DNA, 21 bp, synthetic construct
  source 1..21: mol_type = other DNA; note = Description of Artificial Sequence: Synthetic oligonucleotide; note = Description of Combined DNA/RNA Molecule: Synthetic oligonucleotide
  modified_base 1: mod_base = OTHER; note = 2'-O-methyluridine-3'-phosphate
  modified_base 2: mod_base = OTHER; note = 2'-O-methylcytidine-3'-phosphate
  modified_base 4: mod_base = OTHER; note = 2'-O-methyluridine-3'-phosphate
  modified_base 6: mod_base = OTHER; note = 2'-O-methyluridine-3'-phosphate
  modified_base 9: mod_base = OTHER; note = 2'-O-methylcytidine-3'-phosphate
  modified_base 10: mod_base = OTHER; note = 2'-O-methylcytidine-3'-phosphate
  modified_base 16: mod_base = OTHER; note = 2'-O-methyluridine-3'-phosphate
  modified_base 18: mod_base = OTHER; note = 2'-O-methyluridine-3'-phosphate
  modified_base 19: mod_base = OTHER; note = 2'-O-methyluridine-3'-phosphate
  misc_feature 1..19: note = RNA
  misc_feature 20..21: note = DNA
tcatgtaaccaagagtatttt

SEQ ID NO: 1345 - DNA, 21 bp, synthetic construct
  source 1..21: mol_type = other DNA; note = Description of Artificial Sequence: Synthetic oligonucleotide; note = Description of Combined DNA/RNA Molecule: Synthetic oligonucleotide
  modified_base 3: mod_base = OTHER; note = 2'-O-methyluridine-3'-phosphate
  modified_base 13: mod_base = OTHER; note = 2'-O-methyluridine-3'-phosphate
  modified_base 15: mod_base = OTHER; note = 2'-O-methylcytidine-3'-phosphate
  misc_feature 1..19: note = RNA
  misc_feature 20..21: note = DNA
aatactcttggttacatgatt

SEQ ID NO: 1346 - DNA, 21 bp, synthetic construct
  source 1..21: mol_type = other DNA; note = Description of Artificial Sequence: Synthetic oligonucleotide; note = Description of Combined DNA/RNA Molecule: Synthetic oligonucleotide
  modified_base 1: mod_base = OTHER; note = 2'-O-methylcytidine-3'-phosphate
  modified_base 3: mod_base = OTHER; note = 2'-O-methyluridine-3'-phosphate
  modified_base 5: mod_base = OTHER; note = 2'-O-methyluridine-3'-phosphate
  modified_base 8: mod_base = OTHER; note = 2'-O-methylcytidine-3'-phosphate
  modified_base 9: mod_base = OTHER; note = 2'-O-methylcytidine-3'-phosphate
  modified_base 15: mod_base = OTHER; note = 2'-O-methyluridine-3'-phosphate
  modified_base 17: mod_base = OTHER; note = 2'-O-methyluridine-3'-phosphate
  modified_base 18: mod_base = OTHER; note = 2'-O-methyluridine-3'-phosphate
  modified_base 19: mod_base = OTHER; note = 2'-O-methylcytidine-3'-phosphate
  misc_feature 1..19: note = RNA
  misc_feature 20..21: note = DNA
catgtaaccaagagtattctt

SEQ ID NO: 1347 - DNA, 21 bp, synthetic construct
  source 1..21: mol_type = other DNA; note = Description of Artificial Sequence: Synthetic oligonucleotide; note = Description of Combined DNA/RNA Molecule: Synthetic oligonucleotide
  modified_base 4: mod_base = OTHER; note = 2'-O-methyluridine-3'-phosphate
  modified_base 14: mod_base = OTHER; note = 2'-O-methyluridine-3'-phosphate
  modified_base 16: mod_base = OTHER; note = 2'-O-methylcytidine-3'-phosphate
  misc_feature 1..19: note = RNA
  misc_feature 20..21: note = DNA
gaatactcttggttacatgtt

SEQ ID NO: 1348 - DNA, 21 bp, synthetic construct
  source 1..21: mol_type = other DNA; note = Description of Artificial Sequence: Synthetic oligonucleotide; note = Description of Combined DNA/RNA Molecule: Synthetic oligonucleotide
  modified_base 2: mod_base = OTHER; note = 2'-O-methyluridine-3'-phosphate
  modified_base 4: mod_base = OTHER; note = 2'-O-methyluridine-3'-phosphate
  modified_base 7: mod_base = OTHER; note = 2'-O-methylcytidine-3'-phosphate
  modified_base 8: mod_base = OTHER; note = 2'-O-methylcytidine-3'-phosphate
  modified_base 14: mod_base = OTHER; note = 2'-O-methyluridine-3'-phosphate
  modified_base 16: mod_base = OTHER; note = 2'-O-methyluridine-3'-phosphate
  modified_base 17: mod_base = OTHER; note = 2'-O-methyluridine-3'-phosphate
  modified_base 18: mod_base = OTHER; note = 2'-O-methylcytidine-3'-phosphate
  modified_base 19: mod_base = OTHER; note = 2'-O-methylcytidine-3'-phosphate
  misc_feature 1..19: note = RNA
  misc_feature 20..21: note = DNA
atgtaaccaagagtattcctt

SEQ ID NO: 1349 - DNA, 21 bp, synthetic construct
  source 1..21: mol_type = other DNA; note = Description of Artificial Sequence: Synthetic oligonucleotide; note = Description of Combined DNA/RNA Molecule: Synthetic oligonucleotide
  modified_base 5: mod_base = OTHER; note = 2'-O-methyluridine-3'-phosphate
  modified_base 15: mod_base = OTHER; note = 2'-O-methyluridine-3'-phosphate
  modified_base 17: mod_base = OTHER; note = 2'-O-methylcytidine-3'-phosphate
  misc_feature 1..19: note = RNA
  misc_feature 20..21: note = DNA
ggaatactcttggttacattt

SEQ ID NO: 1350 - DNA, 21 bp, synthetic construct
  source 1..21: mol_type = other DNA; note = Description of Artificial Sequence: Synthetic oligonucleotide; note = Description of Combined DNA/RNA Molecule: Synthetic oligonucleotide
  modified_base 1: mod_base = OTHER; note = 2'-O-methyluridine-3'-phosphate
  modified_base 3: mod_base = OTHER; note = 2'-O-methyluridine-3'-phosphate
  modified_base 6: mod_base = OTHER; note = 2'-O-methylcytidine-3'-phosphate
  modified_base 7: mod_base = OTHER; note = 2'-O-methylcytidine-3'-phosphate
  modified_base 13: mod_base = OTHER; note = 2'-O-methyluridine-3'-phosphate
  modified_base 15: mod_base = OTHER; note = 2'-O-methyluridine-3'-phosphate
  modified_base 16: mod_base = OTHER; note = 2'-O-methyluridine-3'-phosphate
  modified_base 17: mod_base = OTHER; note = 2'-O-methylcytidine-3'-phosphate
  modified_base 18: mod_base = OTHER; note = 2'-O-methylcytidine-3'-phosphate
  misc_feature 1..19: note = RNA
  misc_feature 20..21: note = DNA
tgtaaccaagagtattccatt

SEQ ID NO: 1351 - DNA, 21 bp, synthetic construct
  source 1..21: mol_type = other DNA; note = Description of Artificial Sequence: Synthetic oligonucleotide; note = Description of Combined DNA/RNA Molecule: Synthetic oligonucleotide
  modified_base 6: mod_base = OTHER; note = 2'-O-methyluridine-3'-phosphate
  modified_base 16: mod_base = OTHER; note = 2'-O-methyluridine-3'-phosphate
  modified_base 18: mod_base = OTHER; note = 2'-O-methylcytidine-3'-phosphate
  misc_feature 1..19: note = RNA
  misc_feature 20..21: note = DNA
tggaatactcttggttacatt

SEQ ID NO: 1352 - DNA, 21 bp, synthetic construct
  source 1..21: mol_type = other DNA; note = Description of Artificial Sequence: Synthetic oligonucleotide; note = Description of Combined DNA/RNA Molecule: Synthetic oligonucleotide
  modified_base 1: mod_base = OTHER; note = 2'-O-methyluridine-3'-phosphate
  modified_base 4: mod_base = OTHER; note = 2'-O-methylcytidine-3'-phosphate
  modified_base 5: mod_base = OTHER; note = 2'-O-methylcytidine-3'-phosphate
  modified_base 11: mod_base = OTHER; note = 2'-O-methyluridine-3'-phosphate
  modified_base 13: mod_base = OTHER; note = 2'-O-methyluridine-3'-phosphate
  modified_base 14: mod_base = OTHER; note = 2'-O-methyluridine-3'-phosphate
  modified_base 15: mod_base = OTHER; note = 2'-O-methylcytidine-3'-phosphate
  modified_base 16: mod_base = OTHER; note = 2'-O-methylcytidine-3'-phosphate
  modified_base 18: mod_base = OTHER; note = 2'-O-methyluridine-3'-phosphate
  modified_base 19: mod_base = OTHER; note = 2'-O-methyluridine-3'-phosphate
  misc_feature 1..19: note = RNA
  misc_feature 20..21: note = DNA
taaccaagagtattccatttt

SEQ ID NO: 1353 - DNA, 21 bp, synthetic construct
  source 1..21: mol_type = other DNA; note = Description of Artificial Sequence: Synthetic oligonucleotide; note = Description of Combined DNA/RNA Molecule: Synthetic oligonucleotide
  modified_base 8: mod_base = OTHER; note = 2'-O-methyluridine-3'-phosphate
  modified_base 18: mod_base = OTHER; note = 2'-O-methyluridine-3'-phosphate
  misc_feature 1..19: note = RNA
  misc_feature 20..21: note = DNA
aatggaatactcttggttatt

SEQ ID NO: 1354 - DNA, 21 bp, synthetic construct
  source 1..21: mol_type = other DNA; note = Description of Artificial Sequence: Synthetic oligonucleotide; note = Description of Combined DNA/RNA Molecule: Synthetic oligonucleotide
  modified_base 3: mod_base = OTHER; note = 2'-O-methylcytidine-3'-phosphate
  modified_base 4: mod_base = OTHER; note = 2'-O-methylcytidine-3'-phosphate
  modified_base 10: mod_base = OTHER; note = 2'-O-methyluridine-3'-phosphate
  modified_base 12: mod_base = OTHER; note = 2'-O-methyluridine-3'-phosphate
  modified_base 13: mod_base = OTHER; note = 2'-O-methyluridine-3'-phosphate
  modified_base 14: mod_base = OTHER; note = 2'-O-methylcytidine-3'-phosphate
  modified_base 15: mod_base = OTHER; note = 2'-O-methylcytidine-3'-phosphate
  modified_base 17: mod_base = OTHER; note = 2'-O-methyluridine-3'-phosphate
  modified_base 18: mod_base = OTHER; note = 2'-O-methyluridine-3'-phosphate
  modified_base 19: mod_base = OTHER; note = 2'-O-methyluridine-3'-phosphate
  misc_feature 1..19: note = RNA
  misc_feature 20..21: note = DNA
aaccaagagtattccattttt

SEQ ID NO: 1355 - DNA, 21 bp, synthetic construct
  source 1..21: mol_type = other DNA; note = Description of Artificial Sequence: Synthetic oligonucleotide; note = Description of Combined DNA/RNA Molecule: Synthetic oligonucleotide
  modified_base 9: mod_base = OTHER; note = 2'-O-methyluridine-3'-phosphate
  misc_feature 1..19: note = RNA
  misc_feature 20..21: note = DNA
aaatggaatactcttggtttt

SEQ ID NO: 1356 - DNA, 21 bp, synthetic construct
  source 1..21: mol_type = other DNA; note = Description of Artificial Sequence: Synthetic oligonucleotide; note = Description of Combined DNA/RNA Molecule: Synthetic oligonucleotide
  modified_base 2: mod_base = OTHER; note = 2'-O-methylcytidine-3'-phosphate
  modified_base 3: mod_base = OTHER; note = 2'-O-methylcytidine-3'-phosphate
  modified_base 9: mod_base = OTHER; note = 2'-O-methyluridine-3'-phosphate
  modified_base 11: mod_base = OTHER; note = 2'-O-methyluridine-3'-phosphate
  modified_base 12: mod_base = OTHER; note = 2'-O-methyluridine-3'-phosphate
  modified_base 13: mod_base = OTHER; note = 2'-O-methylcytidine-3'-phosphate
  modified_base 14: mod_base = OTHER; note = 2'-O-methylcytidine-3'-phosphate
  modified_base 16: mod_base = OTHER; note = 2'-O-methyluridine-3'-phosphate
  modified_base 17: mod_base = OTHER; note = 2'-O-methyluridine-3'-phosphate
  modified_base 18: mod_base = OTHER; note = 2'-O-methyluridine-3'-phosphate
  modified_base 19: mod_base = OTHER; note = 2'-O-methyluridine-3'-phosphate
  misc_feature 1..19: note = RNA
  misc_feature 20..21: note = DNA
accaagagtattccatttttt

SEQ ID NO: 1357 - DNA, 21 bp, synthetic construct
  source 1..21: mol_type = other DNA; note = Description of Artificial Sequence: Synthetic oligonucleotide; note = Description of Combined DNA/RNA Molecule: Synthetic oligonucleotide
  modified_base 10: mod_base = OTHER; note = 2'-O-methyluridine-3'-phosphate
  misc_feature 1..19: note = RNA
  misc_feature 20..21: note = DNA
aaaatggaatactcttggttt

SEQ ID NO: 1358 - DNA, 21 bp, synthetic construct
  source 1..21: mol_type = other DNA; note = Description of Artificial Sequence: Synthetic oligonucleotide; note = Description of Combined DNA/RNA Molecule: Synthetic oligonucleotide
  modified_base 1: mod_base = OTHER; note = 2'-O-methylcytidine-3'-phosphate
  modified_base 2: mod_base = OTHER; note = 2'-O-methylcytidine-3'-phosphate
  modified_base 8: mod_base = OTHER; note = 2'-O-methyluridine-3'-phosphate
  modified_base 10: mod_base = OTHER; note = 2'-O-methyluridine-3'-phosphate
  modified_base 11: mod_base = OTHER; note = 2'-O-methyluridine-3'-phosphate
  modified_base 12: mod_base = OTHER; note = 2'-O-methylcytidine-3'-phosphate
  modified_base 13: mod_base = OTHER; note = 2'-O-methylcytidine-3'-phosphate
  modified_base 15: mod_base = OTHER; note = 2'-O-methyluridine-3'-phosphate
  modified_base 16: mod_base = OTHER; note = 2'-O-methyluridine-3'-phosphate
  modified_base 17: mod_base = OTHER; note = 2'-O-methyluridine-3'-phosphate
  modified_base 18: mod_base = OTHER; note = 2'-O-methyluridine-3'-phosphate
  modified_base 19: mod_base = OTHER; note = 2'-O-methyluridine-3'-phosphate
  misc_feature 1..19: note = RNA
  misc_feature 20..21: note = DNA
ccaagagtattccattttttt

SEQ ID NO: 1359 - DNA, 21 bp, synthetic construct
  source 1..21: mol_type = other DNA; note = Description of Artificial Sequence: Synthetic oligonucleotide; note = Description of Combined DNA/RNA Molecule: Synthetic oligonucleotide
  modified_base 11: mod_base = OTHER; note = 2'-O-methyluridine-3'-phosphate
  misc_feature 1..19: note = RNA
  misc_feature 20..21: note = DNA
aaaaatggaatactcttggtt

SEQ ID NO: 1360 - DNA, 21 bp, synthetic construct
  source 1..21: mol_type = other DNA; note = Description of Artificial Sequence: Synthetic oligonucleotide; note = Description of Combined DNA/RNA Molecule: Synthetic oligonucleotide
  modified_base 1: mod_base = OTHER; note = 2'-O-methylcytidine-3'-phosphate
  modified_base 7: mod_base = OTHER; note = 2'-O-methyluridine-3'-phosphate
  modified_base 9: mod_base = OTHER; note = 2'-O-methyluridine-3'-phosphate
  modified_base 10: mod_base = OTHER; note = 2'-O-methyluridine-3'-phosphate
  modified_base 11: mod_base = OTHER; note = 2'-O-methylcytidine-3'-phosphate
  modified_base 12: mod_base = OTHER; note = 2'-O-methylcytidine-3'-phosphate
  modified_base 14: mod_base = OTHER; note = 2'-O-methyluridine-3'-phosphate
  modified_base 15: mod_base = OTHER; note = 2'-O-methyluridine-3'-phosphate
  modified_base 16: mod_base = OTHER; note = 2'-O-methyluridine-3'-phosphate
  modified_base 17: mod_base = OTHER; note = 2'-O-methyluridine-3'-phosphate
  modified_base 18: mod_base = OTHER; note = 2'-O-methyluridine-3'-phosphate
  misc_feature 1..19: note = RNA
  misc_feature 20..21: note = DNA
caagagtattccatttttatt

SEQ ID NO: 1361 - DNA, 21 bp, synthetic construct
  source 1..21: mol_type = other DNA; note = Description of Artificial Sequence: Synthetic oligonucleotide; note = Description of Combined DNA/RNA Molecule: Synthetic oligonucleotide
  modified_base 1: mod_base = OTHER; note = 2'-O-methyluridine-3'-phosphate
  modified_base 12: mod_base = OTHER; note = 2'-O-methyluridine-3'-phosphate
  misc_feature 1..19: note = RNA
  misc_feature 20..21: note = DNA
taaaaatggaatactcttgtt

SEQ ID NO: 1362 - DNA, 21 bp, synthetic construct
  source 1..21: mol_type = other DNA; note = Description of Artificial Sequence: Synthetic oligonucleotide; note = Description of Combined DNA/RNA Molecule: Synthetic oligonucleotide
  modified_base 6: mod_base = OTHER; note = 2'-O-methyluridine-3'-phosphate
  modified_base 8: mod_base = OTHER; note = 2'-O-methyluridine-3'-phosphate
  modified_base 9: mod_base = OTHER; note = 2'-O-methyluridine-3'-phosphate
  modified_base 10: mod_base = OTHER; note = 2'-O-methylcytidine-3'-phosphate
  modified_base 11: mod_base = OTHER; note = 2'-O-methylcytidine-3'-phosphate
  modified_base 13: mod_base = OTHER; note = 2'-O-methyluridine-3'-phosphate
  modified_base 14: mod_base = OTHER; note = 2'-O-methyluridine-3'-phosphate
  modified_base 15: mod_base = OTHER; note = 2'-O-methyluridine-3'-phosphate
  modified_base 16: mod_base = OTHER; note = 2'-O-methyluridine-3'-phosphate
  modified_base 17: mod_base = OTHER; note = 2'-O-methyluridine-3'-phosphate
  modified_base 19: mod_base = OTHER; note = 2'-O-methylcytidine-3'-phosphate
  misc_feature 1..19: note = RNA
  misc_feature 20..21: note = DNA
aagagtattccatttttactt

SEQ ID NO: 1363 - DNA, 21 bp, synthetic construct
  source 1..21: mol_type = other DNA; note = Description of Artificial Sequence: Synthetic oligonucleotide; note = Description of Combined DNA/RNA Molecule: Synthetic oligonucleotide
  modified_base 2: mod_base = OTHER; note = 2'-O-methyluridine-3'-phosphate
  modified_base 13: mod_base = OTHER; note = 2'-O-methyluridine-3'-phosphate
  misc_feature 1..19: note = RNA
  misc_feature 20..21: note = DNA
gtaaaaatggaatactctttt

SEQ ID NO: 1364 - DNA, 21 bp, synthetic construct
  source 1..21: mol_type = other DNA; note = Description of Artificial Sequence: Synthetic oligonucleotide; note = Description of Combined DNA/RNA Molecule: Synthetic oligonucleotide
  modified_base 5: mod_base = OTHER; note = 2'-O-methyluridine-3'-phosphate
  modified_base 7: mod_base = OTHER; note = 2'-O-methyluridine-3'-phosphate
  modified_base 8: mod_base = OTHER; note = 2'-O-methyluridine-3'-phosphate
  modified_base 9: mod_base = OTHER; note = 2'-O-methylcytidine-3'-phosphate
  modified_base 10: mod_base = OTHER; note = 2'-O-methylcytidine-3'-phosphate
  modified_base 12: mod_base = OTHER; note = 2'-O-methyluridine-3'-phosphate
  modified_base 13: mod_base = OTHER; note = 2'-O-methyluridine-3'-phosphate
  modified_base 14: mod_base = OTHER; note = 2'-O-methyluridine-3'-phosphate
  modified_base 15: mod_base = OTHER; note = 2'-O-methyluridine-3'-phosphate
  modified_base 16: mod_base = OTHER; note = 2'-O-methyluridine-3'-phosphate
  modified_base 18: mod_base = OTHER; note = 2'-O-methylcytidine-3'-phosphate
  modified_base 19: mod_base = OTHER; note = 2'-O-methyluridine-3'-phosphate
  misc_feature 1..19: note = RNA
  misc_feature 20..21: note = DNA
agagtattccatttttacttt

SEQ ID NO: 1365 - DNA, 21 bp, synthetic construct
  source 1..21: mol_type = other DNA; note = Description of Artificial Sequence: Synthetic oligonucleotide; note = Description of Combined DNA/RNA Molecule: Synthetic oligonucleotide
  modified_base 3: mod_base = OTHER; note = 2'-O-methyluridine-3'-phosphate
  modified_base 14: mod_base = OTHER; note = 2'-O-methyluridine-3'-phosphate
  misc_feature 1..19: note = RNA
  misc_feature 20..21: note = DNA
agtaaaaatggaatactcttt

SEQ ID NO: 1366 - DNA, 21 bp, synthetic construct
  source 1..21: mol_type = other DNA; note = Description of Artificial Sequence: Synthetic oligonucleotide; note = Description of Combined DNA/RNA Molecule: Synthetic oligonucleotide
  modified_base 4: mod_base = OTHER; note = 2'-O-methyluridine-3'-phosphate
  modified_base 6: mod_base = OTHER; note = 2'-O-methyluridine-3'-phosphate
  modified_base 7: mod_base = OTHER; note = 2'-O-methyluridine-3'-phosphate
  modified_base 8: mod_base = OTHER; note = 2'-O-methylcytidine-3'-phosphate
  modified_base 9: mod_base = OTHER; note = 2'-O-methylcytidine-3'-phosphate
  modified_base 11: mod_base = OTHER; note = 2'-O-methyluridine-3'-phosphate
  modified_base 12: mod_base = OTHER; note = 2'-O-methyluridine-3'-phosphate
  modified_base 13: mod_base = OTHER; note = 2'-O-methyluridine-3'-phosphate
  modified_base 14: mod_base = OTHER; note = 2'-O-methyluridine-3'-phosphate
  modified_base 15: mod_base = OTHER; note = 2'-O-methyluridine-3'-phosphate
  modified_base 17: mod_base = OTHER; note = 2'-O-methylcytidine-3'-phosphate
  modified_base 18: mod_base = OTHER; note = 2'-O-methyluridine-3'-phosphate
  misc_feature 1..19: note = RNA
  misc_feature 20..21: note = DNA
gagtattccatttttactatt

SEQ ID NO: 1367 - DNA, 21 bp, synthetic construct
  source 1..21: mol_type = other DNA; note = Description of Artificial Sequence: Synthetic oligonucleotide; note = Description of Combined DNA/RNA Molecule: Synthetic oligonucleotide
  modified_base 1: mod_base = OTHER; note = 2'-O-methyluridine-3'-phosphate
  modified_base 4: mod_base = OTHER; note = 2'-O-methyluridine-3'-phosphate
  modified_base 15: mod_base = OTHER; note = 2'-O-methyluridine-3'-phosphate
  misc_feature 1..19: note = RNA
  misc_feature 20..21: note = DNA
tagtaaaaatggaatactctt

SEQ ID NO: 1368 - DNA, 21 bp, synthetic construct
  source 1..21: mol_type = other DNA; note = Description of Artificial Sequence: Synthetic oligonucleotide; note = Description of Combined DNA/RNA Molecule: Synthetic oligonucleotide
  modified_base 3: mod_base = OTHER; note = 2'-O-methyluridine-3'-phosphate
  modified_base 5: mod_base = OTHER; note = 2'-O-methyluridine-3'-phosphate
  modified_base 6: mod_base = OTHER; note = 2'-O-methyluridine-3'-phosphate
  modified_base 7: mod_base = OTHER; note = 2'-O-methylcytidine-3'-phosphate
  modified_base 8: mod_base = OTHER; note = 2'-O-methylcytidine-3'-phosphate
  modified_base 10: mod_base = OTHER; note = 2'-O-methyluridine-3'-phosphate
  modified_base 11: mod_base = OTHER; note = 2'-O-methyluridine-3'-phosphate
  modified_base 12: mod_base = OTHER; note = 2'-O-methyluridine-3'-phosphate
  modified_base 13: mod_base = OTHER; note = 2'-O-methyluridine-3'-phosphate
  modified_base 14: mod_base = OTHER; note = 2'-O-methyluridine-3'-phosphate
  modified_base 16: mod_base = OTHER; note = 2'-O-methylcytidine-3'-phosphate
  modified_base 17: mod_base = OTHER; note = 2'-O-methyluridine-3'-phosphate
  misc_feature 1..19: note = RNA
  misc_feature 20..21: note = DNA
agtattccatttttactaatt

SEQ ID NO: 1369 - DNA, 21 bp, synthetic construct
  source 1..21: mol_type = other DNA; note = Description of Artificial Sequence: Synthetic oligonucleotide; note = Description of Combined DNA/RNA Molecule: Synthetic oligonucleotide
  modified_base 2: mod_base = OTHER; note = 2'-O-methyluridine-3'-phosphate
  modified_base 5: mod_base = OTHER; note = 2'-O-methyluridine-3'-phosphate
  modified_base 16: mod_base = OTHER; note = 2'-O-methyluridine-3'-phosphate
  misc_feature 1..19: note = RNA
  misc_feature 20..21: note = DNA
ttagtaaaaatggaatacttt

SEQ ID NO: 1370 - DNA, 21 bp, synthetic construct
  source 1..21: mol_type = other DNA; note = Description of Artificial Sequence: Synthetic oligonucleotide; note = Description of Combined DNA/RNA Molecule: Synthetic oligonucleotide
  modified_base 2: mod_base = OTHER; note = 2'-O-methyluridine-3'-phosphate
  modified_base 4: mod_base = OTHER; note = 2'-O-methyluridine-3'-phosphate
  modified_base 5: mod_base = OTHER; note = 2'-O-methyluridine-3'-phosphate
  modified_base 6: mod_base = OTHER; note = 2'-O-methylcytidine-3'-phosphate
  modified_base 7: mod_base = OTHER; note = 2'-O-methylcytidine-3'-phosphate
  modified_base 9: mod_base = OTHER; note = 2'-O-methyluridine-3'-phosphate
  modified_base 10: mod_base = OTHER; note = 2'-O-methyluridine-3'-phosphate
  modified_base 11: mod_base = OTHER; note = 2'-O-methyluridine-3'-phosphate
  modified_base 12: mod_base = OTHER; note = 2'-O-methyluridine-3'-phosphate
  modified_base 13: mod_base = OTHER; note = 2'-O-methyluridine-3'-phosphate
  modified_base 15: mod_base = OTHER; note = 2'-O-methylcytidine-3'-phosphate
  modified_base 16: mod_base = OTHER; note = 2'-O-methyluridine-3'-phosphate
  misc_feature 1..19: note = RNA
  misc_feature 20..21: note = DNA
gtattccatttttactaaatt

SEQ ID NO: 1371 - DNA, 21 bp, synthetic construct
  source 1..21: mol_type = other DNA; note = Description of Artificial Sequence: Synthetic oligonucleotide; note = Description of Combined DNA/RNA Molecule: Synthetic oligonucleotide
  modified_base 3: mod_base = OTHER; note = 2'-O-methyluridine-3'-phosphate
  modified_base 6: mod_base = OTHER; note = 2'-O-methyluridine-3'-phosphate
  modified_base 17: mod_base = OTHER; note = 2'-O-methyluridine-3'-phosphate
  misc_feature 1..19: note = RNA
  misc_feature 20..21: note = DNA
tttagtaaaaatggaatactt

SEQ ID NO: 1372 - DNA, 21 bp, synthetic construct
  source 1..21: mol_type = other DNA; note = Description of Artificial Sequence: Synthetic oligonucleotide; note = Description of Combined DNA/RNA Molecule: Synthetic oligonucleotide
  modified_base 1: mod_base = OTHER; note = 2'-O-methyluridine-3'-phosphate
  modified_base 3: mod_base = OTHER; note = 2'-O-methyluridine-3'-phosphate
  modified_base 4: mod_base = OTHER; note = 2'-O-methyluridine-3'-phosphate
  modified_base 5: mod_base = OTHER; note = 2'-O-methylcytidine-3'-phosphate
  modified_base 6: mod_base = OTHER; note = 2'-O-methylcytidine-3'-phosphate
  modified_base 8: mod_base = OTHER; note = 2'-O-methyluridine-3'-phosphate
  modified_base 9: mod_base = OTHER; note = 2'-O-methyluridine-3'-phosphate
  modified_base 10: mod_base = OTHER; note = 2'-O-methyluridine-3'-phosphate
  modified_base 11: mod_base = OTHER; note = 2'-O-methyluridine-3'-phosphate
  modified_base 12: mod_base = OTHER; note = 2'-O-methyluridine-3'-phosphate
  modified_base 14: mod_base = OTHER; note = 2'-O-methylcytidine-3'-phosphate
  modified_base 15: mod_base = OTHER; note = 2'-O-methyluridine-3'-phosphate
  misc_feature 1..19: note = RNA
  misc_feature 20..21: note = DNA
tattccatttttactaaagtt

SEQ ID NO: 1373 - DNA, 21 bp, synthetic construct
  source 1..21: mol_type = other DNA; note = Description of Artificial Sequence: Synthetic oligonucleotide; note = Description of Combined DNA/RNA Molecule: Synthetic oligonucleotide
  modified_base 4: mod_base = OTHER; note = 2'-O-methyluridine-3'-phosphate
  modified_base 7: mod_base = OTHER; note = 2'-O-methyluridine-3'-phosphate
  modified_base 18: mod_base = OTHER; note = 2'-O-methyluridine-3'-phosphate
  misc_feature 1..19: note = RNA
  misc_feature 20..21: note = DNA
ctttagtaaaaatggaatatt

SEQ ID NO: 1374 - DNA, 21 bp, synthetic construct
  source 1..21: mol_type = other DNA; note = Description of Artificial Sequence: Synthetic oligonucleotide; note = Description of Combined DNA/RNA Molecule: Synthetic oligonucleotide
  modified_base 2: mod_base = OTHER; note = 2'-O-methyluridine-3'-phosphate
  modified_base 3: mod_base = OTHER; note = 2'-O-methyluridine-3'-phosphate
  modified_base 4: mod_base = OTHER; note = 2'-O-methylcytidine-3'-phosphate
  modified_base 5: mod_base = OTHER; note = 2'-O-methylcytidine-3'-phosphate
  modified_base 7: mod_base = OTHER; note = 2'-O-methyluridine-3'-phosphate
  modified_base 8: mod_base = OTHER; note = 2'-O-methyluridine-3'-phosphate
  modified_base 9: mod_base = OTHER; note = 2'-O-methyluridine-3'-phosphate
  modified_base 10: mod_base = OTHER; note = 2'-O-methyluridine-3'-phosphate
  modified_base 11: mod_base = OTHER; note = 2'-O-methyluridine-3'-phosphate
  modified_base 13: mod_base = OTHER; note = 2'-O-methylcytidine-3'-phosphate
  modified_base 14: mod_base = OTHER; note = 2'-O-methyluridine-3'-phosphate
  modified_base 19: mod_base = OTHER; note = 2'-O-methylcytidine-3'-phosphate
  misc_feature 1..19: note = RNA
  misc_feature 20..21: note = DNA
attccatttttactaaagctt

SEQ ID NO: 1375 - DNA, 21 bp, synthetic construct
  source 1..21: mol_type = other DNA; note = Description of Artificial Sequence: Synthetic oligonucleotide; note = Description of Combined DNA/RNA Molecule: Synthetic oligonucleotide
  modified_base 5: mod_base = OTHER; note = 2'-O-methyluridine-3'-phosphate
  modified_base 8: mod_base = OTHER; note = 2'-O-methyluridine-3'-phosphate
  misc_feature 1..19: note = RNA
  misc_feature 20..21: note = DNA
gctttagtaaaaatggaattt

SEQ ID NO: 1376 - DNA, 21 bp, synthetic construct
  source 1..21: mol_type = other DNA; note = Description of Artificial Sequence: Synthetic oligonucleotide; note = Description of Combined DNA/RNA Molecule: Synthetic oligonucleotide
  modified_base 1: mod_base = OTHER; note = 2'-O-methyluridine-3'-phosphate
  modified_base 2: mod_base = OTHER; note = 2'-O-methyluridine-3'-phosphate
  modified_base 3: mod_base = OTHER; note = 2'-O-methylcytidine-3'-phosphate
  modified_base 4: mod_base = OTHER; note = 2'-O-methylcytidine-3'-phosphate
  modified_base 6: mod_base = OTHER; note = 2'-O-methyluridine-3'-phosphate
  modified_base 7: mod_base = OTHER; note = 2'-O-methyluridine-3'-phosphate
  modified_base 8: mod_base = OTHER; note = 2'-O-methyluridine-3'-phosphate
  modified_base 9: mod_base = OTHER; note = 2'-O-methyluridine-3'-phosphate
  modified_base 10: mod_base = OTHER; note = 2'-O-methyluridine-3'-phosphate
  modified_base 12: mod_base = OTHER; note = 2'-O-methylcytidine-3'-phosphate
  modified_base 13: mod_base = OTHER; note = 2'-O-methyluridine-3'-phosphate
  modified_base 18: mod_base = OTHER; note = 2'-O-methylcytidine-3'-phosphate
  misc_feature 1..19: note = RNA
  misc_feature 20..21: note = DNA
ttccatttttactaaagcatt

SEQ ID NO: 1377 - DNA, 21 bp, synthetic construct
  source 1..21: mol_type = other DNA; note = Description of Artificial Sequence: Synthetic oligonucleotide; note = Description of Combined DNA/RNA Molecule: Synthetic oligonucleotide
  modified_base 6: mod_base = OTHER; note = 2'-O-methyluridine-3'-phosphate
  modified_base 9: mod_base = OTHER; note = 2'-O-methyluridine-3'-phosphate
  misc_feature 1..19: note = RNA
  misc_feature 20..21: note = DNA
tgctttagtaaaaatggaatt

SEQ ID NO: 1378 - DNA, 21 bp, synthetic construct
  source 1..21: mol_type = other DNA; note = Description of Artificial Sequence: Synthetic oligonucleotide; note = Description of Combined DNA/RNA Molecule: Synthetic oligonucleotide
  modified_base 1: mod_base = OTHER; note = 2'-O-methyluridine-3'-phosphate
  modified_base 2: mod_base = OTHER; note = 2'-O-methylcytidine-3'-phosphate
  modified_base 3: mod_base = OTHER; note = 2'-O-methylcytidine-3'-phosphate
  modified_base 5: mod_base = OTHER; note = 2'-O-methyluridine-3'-phosphate
  modified_base 6: mod_base = OTHER; note = 2'-O-methyluridine-3'-phosphate
  modified_base 7: mod_base = OTHER; note = 2'-O-methyluridine-3'-phosphate
  modified_base 8: mod_base = OTHER; note = 2'-O-methyluridine-3'-phosphate
  modified_base 9: mod_base = OTHER; note = 2'-O-methyluridine-3'-phosphate
  modified_base 11: mod_base = OTHER; note = 2'-O-methylcytidine-3'-phosphate
  modified_base 12: mod_base = OTHER; note = 2'-O-methyluridine-3'-phosphate
  modified_base 17: mod_base = OTHER; note = 2'-O-methylcytidine-3'-phosphate
  misc_feature 1..19: note = RNA
  misc_feature 20..21: note = DNA
tccatttttactaaagcagtt

SEQ ID NO: 1379 - DNA, 21 bp, synthetic construct
  source 1..21: mol_type = other DNA; note = Description of Artificial Sequence: Synthetic oligonucleotide; note = Description of Combined DNA/RNA Molecule: Synthetic oligonucleotide
  modified_base 7: mod_base = OTHER; note = 2'-O-methyluridine-3'-phosphate
  modified_base 10: mod_base = OTHER; note = 2'-O-methyluridine-3'-phosphate
  misc_feature 1..19: note = RNA
  misc_feature 20..21: note = DNA
ctgctttagtaaaaatggatt

SEQ ID NO: 1380 - DNA, 21 bp, synthetic construct
  source 1..21: mol_type = other DNA; note = Description of Artificial Sequence: Synthetic oligonucleotide; note = Description of Combined DNA/RNA Molecule: Synthetic oligonucleotide
  modified_base 1: mod_base = OTHER; note = 2'-O-methylcytidine-3'-phosphate
  modified_base 2: mod_base = OTHER; note = 2'-O-methylcytidine-3'-phosphate
  modified_base 4: mod_base = OTHER; note = 2'-O-methyluridine-3'-phosphate
  modified_base 5: mod_base = OTHER; note = 2'-O-methyluridine-3'-phosphate
  modified_base 6: mod_base = OTHER; note = 2'-O-methyluridine-3'-phosphate
  modified_base 7: mod_base = OTHER; note = 2'-O-methyluridine-3'-phosphate
  modified_base 8: mod_base = OTHER; note = 2'-O-methyluridine-3'-phosphate
  modified_base 10: mod_base = OTHER; note = 2'-O-methylcytidine-3'-phosphate
  modified_base 11: mod_base = OTHER; note = 2'-O-methyluridine-3'-phosphate
  modified_base 16: mod_base = OTHER; note = 2'-O-methylcytidine-3'-phosphate
  modified_base 19: mod_base = OTHER; note = 2'-O-methyluridine-3'-phosphate
  misc_feature 1..19: note = RNA
  misc_feature 20..21: note = DNA
ccatttttactaaagcagttt

SEQ ID NO: 1381 - DNA, 21 bp, synthetic construct
  source 1..21: mol_type = other DNA; note = Description of Artificial Sequence: Synthetic oligonucleotide; note = Description of Combined DNA/RNA Molecule: Synthetic oligonucleotide
  modified_base 8: mod_base = OTHER; note = 2'-O-methyluridine-3'-phosphate
  modified_base 11: mod_base = OTHER; note = 2'-O-methyluridine-3'-phosphate
  misc_feature 1..19: note = RNA
  misc_feature 20..21: note = DNA
actgctttagtaaaaatggtt

SEQ ID NO: 1382 - DNA, 21 bp, synthetic construct
  source 1..21: mol_type = other DNA; note = Description of Artificial Sequence: Synthetic oligonucleotide; note = Description of Combined DNA/RNA Molecule: Synthetic oligonucleotide
  modified_base 1: mod_base = OTHER; note = 2'-O-methylcytidine-3'-phosphate
  modified_base 3: mod_base = OTHER; note = 2'-O-methyluridine-3'-phosphate
  modified_base 4: mod_base = OTHER; note = 2'-O-methyluridine-3'-phosphate
  modified_base 5: mod_base = OTHER; note = 2'-O-methyluridine-3'-phosphate
  modified_base 6: mod_base = OTHER; note = 2'-O-methyluridine-3'-phosphate
  modified_base 7: mod_base = OTHER; note = 2'-O-methyluridine-3'-phosphate
  modified_base 9: mod_base = OTHER; note = 2'-O-methylcytidine-3'-phosphate
  modified_base 10: mod_base = OTHER; note = 2'-O-methyluridine-3'-phosphate
  modified_base 15: mod_base = OTHER; note = 2'-O-methylcytidine-3'-phosphate
  modified_base 18: mod_base = OTHER; note = 2'-O-methyluridine-3'-phosphate
  misc_feature 1..19: note = RNA
  misc_feature 20..21: note = DNA
catttttactaaagcagtgtt

SEQ ID NO: 1383 - DNA, 21 bp, synthetic construct
  source 1..21: mol_type = other DNA; note = Description of Artificial Sequence: Synthetic oligonucleotide; note = Description of Combined DNA/RNA Molecule: Synthetic oligonucleotide
  modified_base 1: mod_base = OTHER; note = 2'-O-methylcytidine-3'-phosphate
  modified_base 9: mod_base = OTHER; note = 2'-O-methyluridine-3'-phosphate
  modified_base 12: mod_base = OTHER; note = 2'-O-methyluridine-3'-phosphate
  misc_feature 1..19: note = RNA
  misc_feature 20..21: note = DNA
cactgctttagtaaaaatgtt

SEQ ID NO: 1384 - DNA, 21 bp, synthetic construct
  source 1..21: mol_type = other DNA; note = Description of Artificial Sequence: Synthetic oligonucleotide; note = Description of Combined DNA/RNA Molecule: Synthetic oligonucleotide
  modified_base 2: mod_base = OTHER; note = 2'-O-methyluridine-3'-phosphate
  modified_base 3: mod_base = OTHER; note = 2'-O-methyluridine-3'-phosphate
  modified_base 4: mod_base = OTHER; note = 2'-O-methyluridine-3'-phosphate
  modified_base 5: mod_base = OTHER; note = 2'-O-methyluridine-3'-phosphate
  modified_base 6: mod_base = OTHER; note = 2'-O-methyluridine-3'-phosphate
  modified_base 8: mod_base = OTHER; note = 2'-O-methylcytidine-3'-phosphate
  modified_base 9: mod_base = OTHER; note = 2'-O-methyluridine-3'-phosphate
  modified_base 14: mod_base = OTHER; note = 2'-O-methylcytidine-3'-phosphate
  modified_base 17: mod_base = OTHER; note = 2'-O-methyluridine-3'-phosphate
  modified_base 19: mod_base = OTHER; note = 2'-O-methyluridine-3'-phosphate
  misc_feature 1..19: note = RNA
  misc_feature 20..21: note = DNA
atttttactaaagcagtgttt

SEQ ID NO: 1385 - DNA, 21 bp, synthetic construct
  source 1..21: mol_type = other DNA; note = Description of Artificial Sequence: Synthetic oligonucleotide; note = Description of Combined DNA/RNA Molecule: Synthetic oligonucleotide
  modified_base 2: mod_base = OTHER; note = 2'-O-methylcytidine-3'-phosphate
  modified_base 10: mod_base = OTHER; note = 2'-O-methyluridine-3'-phosphate
  modified_base 13: mod_base = OTHER; note = 2'-O-methyluridine-3'-phosphate
  misc_feature 1..19: note = RNA
  misc_feature 20..21: note = DNA
acactgctttagtaaaaattt

SEQ ID NO: 1386 - DNA, 21 bp, synthetic construct
  source 1..21: mol_type = other DNA; note = Description of Artificial Sequence: Synthetic oligonucleotide; note = Description of Combined DNA/RNA Molecule: Synthetic oligonucleotide
  modified_base 1: mod_base = OTHER; note = 2'-O-methyluridine-3'-phosphate
  modified_base 2: mod_base = OTHER; note = 2'-O-methyluridine-3'-phosphate
  modified_base 3: mod_base = OTHER; note = 2'-O-methyluridine-3'-phosphate
  modified_base 4: mod_base = OTHER; note = 2'-O-methyluridine-3'-phosphate
  modified_base 5: mod_base = OTHER; note = 2'-O-methyluridine-3'-phosphate
  modified_base 7: mod_base = OTHER; note = 2'-O-methylcytidine-3'-phosphate
  modified_base 8: mod_base = OTHER; note = 2'-O-methyluridine-3'-phosphate
  modified_base 13: mod_base = OTHER; note = 2'-O-methylcytidine-3'-phosphate
  modified_base 16: mod_base = OTHER; note = 2'-O-methyluridine-3'-phosphate
  modified_base 18: mod_base = OTHER; note = 2'-O-methyluridine-3'-phosphate
  modified_base 19: mod_base = OTHER; note = 2'-O-methyluridine-3'-phosphate
  misc_feature 1..19: note = RNA
  misc_feature 20..21: note = DNA
tttttactaaagcagtgtttt

SEQ ID NO: 1387 - DNA, 21 bp, synthetic construct
  source 1..21: mol_type = other DNA; note = Description of Artificial Sequence: Synthetic oligonucleotide; note = Description of Combined DNA/RNA Molecule: Synthetic oligonucleotide
  modified_base 3: mod_base = OTHER; note = 2'-O-methylcytidine-3'-phosphate
  modified_base 11: mod_base = OTHER; note = 2'-O-methyluridine-3'-phosphate
  modified_base 14: mod_base = OTHER; note = 2'-O-methyluridine-3'-phosphate
  misc_feature 1..19: note = RNA
  misc_feature 20..21: note = DNA
aacactgctttagtaaaaatt

SEQ ID NO: 1388 - DNA, 21 bp, synthetic construct
  source 1..21: mol_type = other DNA; note = Description of Artificial Sequence: Synthetic oligonucleotide; note = Description of Combined DNA/RNA Molecule: Synthetic oligonucleotide
  modified_base 1: mod_base = OTHER; note = 2'-O-methyluridine-3'-phosphate
  modified_base 2: mod_base = OTHER; note = 2'-O-methyluridine-3'-phosphate
  modified_base 3: mod_base = OTHER; note = 2'-O-methyluridine-3'-phosphate
  modified_base 4: mod_base = OTHER; note = 2'-O-methyluridine-3'-phosphate
  modified_base 6: mod_base = OTHER; note = 2'-O-methylcytidine-3'-phosphate
  modified_base 7: mod_base = OTHER; note = 2'-O-methyluridine-3'-phosphate
  modified_base 12: mod_base = OTHER; note = 2'-O-methylcytidine-3'-phosphate
  modified_base 15: mod_base = OTHER; note = 2'-O-methyluridine-3'-phosphate
  modified_base 17: mod_base = OTHER; note = 2'-O-methyluridine-3'-phosphate
  modified_base 18: mod_base = OTHER; note = 2'-O-methyluridine-3'-phosphate
  modified_base 19: mod_base = OTHER; note = 2'-O-methyluridine-3'-phosphate
  misc_feature 1..19: note = RNA
  misc_feature 20..21: note = DNA
ttttactaaagcagtgttttt

SEQ ID NO: 1389 - DNA, 21 bp, synthetic construct
  source 1..21: mol_type = other DNA; note = Description of Artificial Sequence: Synthetic oligonucleotide; note = Description of Combined DNA/RNA Molecule: Synthetic oligonucleotide
  modified_base 4: mod_base = OTHER; note = 2'-O-methylcytidine-3'-phosphate
  modified_base 12: mod_base = OTHER; note = 2'-O-methyluridine-3'-phosphate
  modified_base 15: mod_base = OTHER; note = 2'-O-methyluridine-3'-phosphate
  misc_feature 1..19: note = RNA
  misc_feature 20..21: note = DNA
aaacactgctttagtaaaatt

SEQ ID NO: 1390 - DNA, 21 bp, synthetic construct
  source 1..21: mol_type = other DNA; note = Description of Artificial Sequence: Synthetic oligonucleotide; note = Description of Combined DNA/RNA Molecule: Synthetic oligonucleotide
  modified_base 1: mod_base = OTHER; note = 2'-O-methyluridine-3'-phosphate
  modified_base 2: mod_base = OTHER; note = 2'-O-methyluridine-3'-phosphate
  modified_base 3: mod_base = OTHER; note = 2'-O-methyluridine-3'-phosphate
  modified_base 5: mod_base = OTHER; note = 2'-O-methylcytidine-3'-phosphate
  modified_base 6: mod_base = OTHER; note = 2'-O-methyluridine-3'-phosphate
  modified_base 11: mod_base = OTHER; note = 2'-O-methylcytidine-3'-phosphate
  modified_base 14: mod_base = OTHER; note = 2'-O-methyluridine-3'-phosphate
  modified_base 16: mod_base = OTHER; note = 2'-O-methyluridine-3'-phosphate
  modified_base 17: mod_base = OTHER; note = 2'-O-methyluridine-3'-phosphate
  modified_base 18: mod_base = OTHER; note = 2'-O-methyluridine-3'-phosphate
  modified_base 19: mod_base = OTHER; note = 2'-O-methyluridine-3'-phosphate
  misc_feature 1..19: note = RNA
  misc_feature 20..21: note = DNA
tttactaaagcagtgtttttt

SEQ ID NO: 1391 - DNA, 21 bp, synthetic construct
  source 1..21: mol_type = other DNA; note = Description of Artificial Sequence: Synthetic oligonucleotide; note = Description of Combined DNA/RNA Molecule: Synthetic oligonucleotide
  modified_base 5: mod_base = OTHER; note = 2'-O-methylcytidine-3'-phosphate
  modified_base 13: mod_base = OTHER; note = 2'-O-methyluridine-3'-phosphate
  modified_base 16: mod_base = OTHER; note = 2'-O-methyluridine-3'-phosphate
  misc_feature 1..19: note = RNA
  misc_feature 20..21: note = DNA
aaaacactgctttagtaaatt

SEQ ID NO: 1392 - DNA, 21 bp, synthetic construct
  source 1..21: mol_type = other DNA; note = Description of Artificial Sequence: Synthetic oligonucleotide; note = Description of Combined DNA/RNA Molecule: Synthetic oligonucleotide
  modified_base 1: mod_base = OTHER; note = 2'-O-methyluridine-3'-phosphate
  modified_base 2: mod_base = OTHER; note = 2'-O-methyluridine-3'-phosphate
  modified_base 4: mod_base = OTHER; note = 2'-O-methylcytidine-3'-phosphate
  modified_base 5: mod_base = OTHER; note = 2'-O-methyluridine-3'-phosphate
  modified_base 10: mod_base = OTHER; note = 2'-O-methylcytidine-3'-phosphate
  modified_base 13: mod_base = OTHER; note = 2'-O-methyluridine-3'-phosphate
  modified_base 15: mod_base = OTHER; note = 2'-O-methyluridine-3'-phosphate
  modified_base 16: mod_base = OTHER; note = 2'-O-methyluridine-3'-phosphate
  modified_base 17: mod_base = OTHER; note = 2'-O-methyluridine-3'-phosphate
  modified_base 18: mod_base = OTHER; note = 2'-O-methyluridine-3'-phosphate
  modified_base 19: mod_base = OTHER; note = 2'-O-methylcytidine-3'-phosphate
  misc_feature 1..19: note = RNA
  misc_feature 20..21: note = DNA
ttactaaagcagtgttttctt

SEQ ID NO: 1393 - DNA, 21 bp, synthetic construct
  source 1..21: mol_type = other DNA; note = Description of Artificial Sequence: Synthetic oligonucleotide; note = Description of Combined DNA/RNA Molecule: Synthetic oligonucleotide
  modified_base 6: mod_base = OTHER; note = 2'-O-methylcytidine-3'-phosphate
  modified_base 14: mod_base = OTHER; note = 2'-O-methyluridine-3'-phosphate
  modified_base 17: mod_base = OTHER; note = 2'-O-methyluridine-3'-phosphate
  misc_feature 1..19: note = RNA
  misc_feature 20..21: note = DNA
gaaaacactgctttagtaatt

SEQ ID NO: 1394 - DNA, 21 bp, synthetic construct
  source 1..21: mol_type = other DNA; note = Description of Artificial Sequence: Synthetic oligonucleotide; note = Description of Combined DNA/RNA Molecule: Synthetic oligonucleotide
  modified_base 1: mod_base = OTHER; note = 2'-O-methyluridine-3'-phosphate
  modified_base 3: mod_base = OTHER; note = 2'-O-methylcytidine-3'-phosphate
  modified_base 4: mod_base = OTHER; note = 2'-O-methyluridine-3'-phosphate
  modified_base 9: mod_base = OTHER; note = 2'-O-methylcytidine-3'-phosphate
  modified_base 12: mod_base = OTHER; note = 2'-O-methyluridine-3'-phosphate
  modified_base 14: mod_base = OTHER; note = 2'-O-methyluridine-3'-phosphate
  modified_base 15: mod_base = OTHER; note = 2'-O-methyluridine-3'-phosphate
  modified_base 16: mod_base = OTHER; note = 2'-O-methyluridine-3'-phosphate
  modified_base 17: mod_base = OTHER; note = 2'-O-methyluridine-3'-phosphate
  modified_base 18: mod_base = OTHER; note = 2'-O-methylcytidine-3'-phosphate
  misc_feature 1..19: note = RNA
  misc_feature 20..21: note = DNA
tactaaagcagtgttttcatt

SEQ ID NO: 1395 - DNA, 21 bp, synthetic construct
  source 1..21: mol_type = other DNA; note = Description of Artificial Sequence: Synthetic oligonucleotide; note = Description of Combined DNA/RNA Molecule: Synthetic oligonucleotide
  modified_base 7: mod_base = OTHER; note = 2'-O-methylcytidine-3'-phosphate
  modified_base 15: mod_base = OTHER; note = 2'-O-methyluridine-3'-phosphate
  modified_base 18: mod_base = OTHER; note = 2'-O-methyluridine-3'-phosphate
  misc_feature 1..19: note = RNA
  misc_feature 20..21: note = DNA
tgaaaacactgctttagtatt

SEQ ID NO: 1396 - DNA, 21 bp, synthetic construct
  source 1..21: mol_type = other DNA; note = Description of Artificial Sequence: Synthetic oligonucleotide; note = Description of Combined DNA/RNA Molecule: Synthetic oligonucleotide
  modified_base 2: mod_base = OTHER; note = 2'-O-methylcytidine-3'-phosphate
  modified_base 3: mod_base = OTHER; note = 2'-O-methyluridine-3'-phosphate
  modified_base 8: mod_base = OTHER; note = 2'-O-methylcytidine-3'-phosphate
  modified_base 11: mod_base = OTHER; note = 2'-O-methyluridine-3'-phosphate
  modified_base 13: mod_base = OTHER; note = 2'-O-methyluridine-3'-phosphate
  modified_base 14: mod_base = OTHER; note = 2'-O-methyluridine-3'-phosphate
  modified_base 15: mod_base = OTHER; note = 2'-O-methyluridine-3'-phosphate
  modified_base 16: mod_base = OTHER; note = 2'-O-methyluridine-3'-phosphate
  modified_base 17: mod_base = OTHER; note = 2'-O-methylcytidine-3'-phosphate
  modified_base 19: mod_base = OTHER; note = 2'-O-methylcytidine-3'-phosphate
  misc_feature 1..19: note = RNA
  misc_feature 20..21: note = DNA
actaaagcagtgttttcactt

SEQ ID NO: 1397 - DNA, 21 bp, synthetic construct
  source 1..21: mol_type = other DNA; note = Description of Artificial Sequence: Synthetic oligonucleotide; note = Description of Combined DNA/RNA Molecule: Synthetic oligonucleotide
  modified_base 8: mod_base = OTHER; note = 2'-O-methylcytidine-3'-phosphate
  modified_base 16: mod_base = OTHER; note = 2'-O-methyluridine-3'-phosphate
  misc_feature 1..19: note = RNA
  misc_feature 20..21: note = DNA
gtgaaaacactgctttagttt

SEQ ID NO: 1398 - DNA, 21 bp, synthetic construct
  source 1..21: mol_type = other DNA; note = Description of Artificial Sequence: Synthetic oligonucleotide; note = Description of Combined DNA/RNA Molecule: Synthetic oligonucleotide
  modified_base 1: mod_base = OTHER; note = 2'-O-methylcytidine-3'-phosphate
  modified_base 2: mod_base = OTHER; note = 2'-O-methyluridine-3'-phosphate
  modified_base 7: mod_base = OTHER; note = 2'-O-methylcytidine-3'-phosphate
  modified_base 10: mod_base = OTHER; note = 2'-O-methyluridine-3'-phosphate
  modified_base 12: mod_base = OTHER; note = 2'-O-methyluridine-3'-phosphate
  modified_base 13: mod_base = OTHER; note = 2'-O-methyluridine-3'-phosphate
  modified_base 14: mod_base = OTHER; note = 2'-O-methyluridine-3'-phosphate
  modified_base 15: mod_base = OTHER; note = 2'-O-methyluridine-3'-phosphate
  modified_base 16: mod_base = OTHER; note = 2'-O-methylcytidine-3'-phosphate
  modified_base 18: mod_base = OTHER; note = 2'-O-methylcytidine-3'-phosphate
  modified_base 19: mod_base = OTHER; note = 2'-O-methylcytidine-3'-phosphate
  misc_feature 1..19: note = RNA
  misc_feature 20..21: note = DNA
ctaaagcagtgttttcacctt

SEQ ID NO: 1399 - DNA, 21 bp, synthetic construct
  source 1..21: mol_type = other DNA; note = Description of Artificial Sequence: Synthetic oligonucleotide; note = Description of Combined DNA/RNA Molecule: Synthetic oligonucleotide
  modified_base 9: mod_base = OTHER; note = 2'-O-methylcytidine-3'-phosphate
  modified_base 17: mod_base = OTHER; note = 2'-O-methyluridine-3'-phosphate
  misc_feature 1..19: note = RNA
  misc_feature 20..21: note = DNA
ggtgaaaacactgctttagtt

SEQ ID NO: 1400 - DNA, 21 bp, synthetic construct
  source 1..21: mol_type = other DNA; note = Description of Artificial Sequence: Synthetic oligonucleotide; note = Description of Combined DNA/RNA Molecule: Synthetic oligonucleotide
  modified_base 1: mod_base = OTHER; note = 2'-O-methyluridine-3'-phosphate
  modified_base 6: mod_base = OTHER; note = 2'-O-methylcytidine-3'-phosphate
  modified_base 9: mod_base = OTHER; note = 2'-O-methyluridine-3'-phosphate
  modified_base 11: mod_base = OTHER; note = 2'-O-methyluridine-3'-phosphate
  modified_base 12: mod_base = OTHER; note = 2'-O-methyluridine-3'-phosphate
  modified_base 13: mod_base = OTHER; note = 2'-O-methyluridine-3'-phosphate
  modified_base 14: mod_base = OTHER; note = 2'-O-methyluridine-3'-phosphate
  modified_base 15: mod_base = OTHER; note = 2'-O-methylcytidine-3'-phosphate
  modified_base 17: mod_base = OTHER; note = 2'-O-methylcytidine-3'-phosphate
  modified_base 18: mod_base = OTHER; note = 2'-O-methylcytidine-3'-phosphate
  modified_base 19: mod_base = OTHER; note = 2'-O-methyluridine-3'-phosphate
  misc_feature 1..19: note = RNA
  misc_feature 20..21: note = DNA
taaagcagtgttttcaccttt

SEQ ID NO: 1401 - DNA, 21 bp, synthetic construct
  source 1..21: mol_type = other DNA; note = Description of Artificial Sequence: Synthetic oligonucleotide; note = Description of Combined DNA/RNA Molecule: Synthetic oligonucleotide
  modified_base 10: mod_base = OTHER; note = 2'-O-methylcytidine-3'-phosphate
  modified_base 18: mod_base = OTHER; note = 2'-O-methyluridine-3'-phosphate
  misc_feature 1..19: note = RNA
  misc_feature 20..21: note = DNA
aggtgaaaacactgctttatt

SEQ ID NO: 1402 - DNA, 21 bp, synthetic construct
  source 1..21: mol_type = other DNA; note = Description of Artificial Sequence: Synthetic oligonucleotide; note = Description of Combined DNA/RNA Molecule: Synthetic oligonucleotide
  modified_base 5: mod_base = OTHER; note = 2'-O-methylcytidine-3'-phosphate
  modified_base 8: mod_base = OTHER; note = 2'-O-methyluridine-3'-phosphate
  modified_base 10: mod_base = OTHER; note = 2'-O-methyluridine-3'-phosphate
  modified_base 11: mod_base = OTHER; note = 2'-O-methyluridine-3'-phosphate
  modified_base 12: mod_base = OTHER; note = 2'-O-methyluridine-3'-phosphate
  modified_base 13: mod_base = OTHER; note = 2'-O-methyluridine-3'-phosphate
  modified_base 14: mod_base = OTHER; note = 2'-O-methylcytidine-3'-phosphate
  modified_base 16: mod_base = OTHER; note = 2'-O-methylcytidine-3'-phosphate
  modified_base 17: mod_base = OTHER; note = 2'-O-methylcytidine-3'-phosphate
  modified_base 18: mod_base = OTHER; note = 2'-O-methyluridine-3'-phosphate
  modified_base 19: mod_base = OTHER; note = 2'-O-methylcytidine-3'-phosphate
  misc_feature 1..19: note = RNA
  misc_feature 20..21: note = DNA
aaagcagtgttttcacctctt

SEQ ID NO: 1403 - DNA, 21 bp, synthetic construct
  source 1..21: mol_type = other DNA; note = Description of Artificial Sequence: Synthetic oligonucleotide; note = Description of Combined DNA/RNA Molecule: Synthetic oligonucleotide
  modified_base 11: mod_base = OTHER; note = 2'-O-methylcytidine-3'-phosphate
  misc_feature 1..19: note = RNA
  misc_feature 20..21: note = DNA
gaggtgaaaacactgcttttt

SEQ ID NO: 1404 - DNA, 21 bp, synthetic construct
  source 1..21: mol_type = other DNA; note = Description of Artificial Sequence: Synthetic oligonucleotide; note = Description of Combined DNA/RNA Molecule: Synthetic oligonucleotide
  modified_base 4: mod_base = OTHER; note = 2'-O-methylcytidine-3'-phosphate
  modified_base 7: mod_base = OTHER; note = 2'-O-methyluridine-3'-phosphate
  modified_base 9: mod_base = OTHER; note = 2'-O-methyluridine-3'-phosphate
  modified_base 10: mod_base = OTHER; note = 2'-O-methyluridine-3'-phosphate
  modified_base 11: mod_base = OTHER; note = 2'-O-methyluridine-3'-phosphate
  modified_base 12: mod_base = OTHER; note = 2'-O-methyluridine-3'-phosphate
  modified_base 13: mod_base = OTHER; note = 2'-O-methylcytidine-3'-phosphate
  modified_base 15: mod_base = OTHER; note = 2'-O-methylcytidine-3'-phosphate
  modified_base 16: mod_base = OTHER; note = 2'-O-methylcytidine-3'-phosphate
  modified_base 17: mod_base = OTHER; note = 2'-O-methyluridine-3'-phosphate
  modified_base 18: mod_base = OTHER; note = 2'-O-methylcytidine-3'-phosphate
  misc_feature 1..19: note = RNA
  misc_feature 20..21: note = DNA
aagcagtgttttcacctcatt

SEQ ID NO: 1405 - DNA, 21 bp, synthetic construct
  source 1..21: mol_type = other DNA; note = Description of Artificial Sequence: Synthetic oligonucleotide; note = Description of Combined DNA/RNA Molecule: Synthetic oligonucleotide
  modified_base 12: mod_base = OTHER; note = 2'-O-methylcytidine-3'-phosphate
  misc_feature 1..19: note = RNA
  misc_feature 20..21: note = DNA
tgaggtgaaaacactgctttt

SEQ ID NO: 1406 - DNA, 21 bp, synthetic construct
  source 1..21: mol_type = other DNA; note = Description of Artificial Sequence: Synthetic oligonucleotide; note = Description of Combined DNA/RNA Molecule: Synthetic oligonucleotide
  modified_base 3: mod_base = OTHER; note = 2'-O-methylcytidine-3'-phosphate
  modified_base 6: mod_base = OTHER; note = 2'-O-methyluridine-3'-phosphate
  modified_base 8: mod_base = OTHER; note = 2'-O-methyluridine-3'-phosphate
  modified_base 9: mod_base = OTHER; note = 2'-O-methyluridine-3'-phosphate
  modified_base 10: mod_base = OTHER; note = 2'-O-methyluridine-3'-phosphate
  modified_base 11: mod_base = OTHER; note = 2'-O-methyluridine-3'-phosphate
  modified_base 12: mod_base = OTHER; note = 2'-O-methylcytidine-3'-phosphate
  modified_base 14: mod_base = OTHER; note = 2'-O-methylcytidine-3'-phosphate
  modified_base 15: mod_base = OTHER; note = 2'-O-methylcytidine-3'-phosphate
  modified_base 16: mod_base = OTHER; note = 2'-O-methyluridine-3'-phosphate
  modified_base 17: mod_base = OTHER; note = 2'-O-methylcytidine-3'-phosphate
  modified_base 19: mod_base = OTHER; note = 2'-O-methyluridine-3'-phosphate
  misc_feature 1..19: note = RNA
  misc_feature 20..21: note = DNA
agcagtgttttcacctcattt

SEQ ID NO: 1407 - DNA, 21 bp, synthetic construct
  source 1..21: mol_type = other DNA; note = Description of Artificial Sequence: Synthetic oligonucleotide; note = Description of Combined DNA/RNA Molecule: Synthetic oligonucleotide
  modified_base 13: mod_base = OTHER; note = 2'-O-methylcytidine-3'-phosphate
  misc_feature 1..19: note = RNA
  misc_feature 20..21: note = DNA
atgaggtgaaaacactgcttt

SEQ ID NO: 1408 - DNA, 21 bp, synthetic construct
  source 1..21: mol_type = other DNA; note = Description of Artificial Sequence: Synthetic oligonucleotide; note = Description of Combined DNA/RNA Molecule: Synthetic oligonucleotide
  modified_base 2: mod_base = OTHER; note = 2'-O-methyluridine-3'-phosphate
  modified_base 5: mod_base = OTHER; note = 2'-O-methylcytidine-3'-phosphate
  modified_base 6: mod_base = OTHER; note = 2'-O-methylcytidine-3'-phosphate
  modified_base 12: mod_base = OTHER; note = 2'-O-methyluridine-3'-phosphate
  modified_base 14: mod_base = OTHER; note = 2'-O-methyluridine-3'-phosphate
  modified_base 15: mod_base = OTHER; note = 2'-O-methyluridine-3'-phosphate
  modified_base 16: mod_base = OTHER; note = 2'-O-methylcytidine-3'-phosphate
  modified_base 17: mod_base = OTHER; note = 2'-O-methylcytidine-3'-phosphate
  modified_base 19: mod_base = OTHER; note = 2'-O-methyluridine-3'-phosphate
  misc_feature 1..19: note = RNA
  misc_feature 20..21: note = DNA
gtaaccaagagtattccattt

SEQ ID NO: 1409 - DNA, 21 bp, synthetic construct
  source 1..21: mol_type = other DNA; note = Description of Artificial Sequence: Synthetic oligonucleotide; note = Description of Combined DNA/RNA Molecule: Synthetic oligonucleotide
  modified_base 7: mod_base = OTHER; note = 2'-O-methyluridine-3'-phosphate
  modified_base 17: mod_base = OTHER; note = 2'-O-methyluridine-3'-phosphate
  misc_feature 1..19: note = RNA
  misc_feature 20..21: note = DNA
atggaatactcttggttactt

SEQ ID NO: 1410 - DNA, 19 bp, synthetic construct
  source 1..19: mol_type = other DNA; note = Description of Artificial Sequence: Synthetic oligonucleotide; note = Description of Combined DNA/RNA Molecule: Synthetic oligonucleotide
gtaaccaagagtattccat

SEQ ID NO: 1411 - DNA, 21 bp, synthetic construct
  source 1..21: mol_type = other DNA; note = Description of Artificial Sequence: Synthetic oligonucleotide; note = Description of Combined DNA/RNA Molecule: Synthetic oligonucleotide
  modified_base 1: mod_base = OTHER; note = 2'-O-methylcytidine-3'-phosphate
  modified_base 4: mod_base = OTHER; note = 2'-O-methyluridine-3'-phosphate
  modified_base 6: mod_base = OTHER; note = 2'-O-methyluridine-3'-phosphate
  modified_base 7: mod_base = OTHER; note = 2'-O-methyluridine-3'-phosphate
  modified_base 8: mod_base = OTHER; note = 2'-O-methylcytidine-3'-phosphate
  modified_base 9: mod_base = OTHER; note = 2'-O-methyluridine-3'-phosphate
  modified_base 10: mod_base = OTHER; note = 2'-O-methyluridine-3'-phosphate
  modified_base 12: mod_base = OTHER; note = 2'-O-methylcytidine-3'-phosphate
  modified_base 13: mod_base = OTHER; note = 2'-O-methyluridine-3'-phosphate
  modified_base 14: mod_base = OTHER; note = 2'-O-methylcytidine-3'-phosphate
  modified_base 15: mod_base = OTHER; note = 2'-O-methyluridine-3'-phosphate
  modified_base 17: mod_base = OTHER; note = 2'-O-methyluridine-3'-phosphate
  misc_feature 1..19: note = RNA
  misc_feature 20..21: note = DNA
cagtgttcttgctctataatt

SEQ ID NO: 1412 - DNA, 21 bp, synthetic construct
  source 1..21: mol_type = other DNA; note = Description of Artificial Sequence: Synthetic oligonucleotide; note = Description of Combined DNA/RNA Molecule: Synthetic oligonucleotide
  modified_base 2: mod_base = OTHER; note = 2'-O-methyluridine-3'-phosphate
  modified_base 4: mod_base = OTHER; note = 2'-O-methyluridine-3'-phosphate
  modified_base 9: mod_base = OTHER; note = 2'-O-methylcytidine-3'-phosphate
  modified_base 15: mod_base = OTHER; note = 2'-O-methylcytidine-3'-phosphate
  misc_feature 1..19: note = RNA
  misc_feature 20..21: note = DNA
ttatagagcaagaacactgtt

SEQ ID NO: 1413 - DNA, 21 bp, synthetic construct
  source 1..21: mol_type = other DNA; note = Description of Artificial Sequence: Synthetic oligonucleotide; note = Description of Combined DNA/RNA Molecule: Synthetic oligonucleotide
  modified_base 4: mod_base = OTHER; note = 2'-O-methyluridine-3'-phosphate
  modified_base 5: mod_base = OTHER; note = 2'-O-methyluridine-3'-phosphate
  modified_base 6: mod_base = OTHER; note = 2'-O-methyluridine-3'-phosphate
  modified_base 7: mod_base = OTHER; note = 2'-O-methylcytidine-3'-phosphate
  modified_base 9: mod_base = OTHER; note = 2'-O-methyluridine-3'-phosphate
  modified_base 11: mod_base = OTHER; note = 2'-O-methyluridine-3'-phosphate
  modified_base 14: mod_base = OTHER; note = 2'-O-methylcytidine-3'-phosphate
  modified_base 15: mod_base = OTHER; note = 2'-O-methylcytidine-3'-phosphate
  misc_feature 1..19: note = RNA
  misc_feature 20..21: note = DNA
ggatttcatgtaaccaagatt

SEQ ID NO: 1414 - DNA, 21 bp, synthetic construct
  source 1..21: mol_type = other DNA; note = Description of Artificial Sequence: Synthetic oligonucleotide; note = Description of Combined DNA/RNA Molecule: Synthetic oligonucleotide
  modified_base 8: mod_base = OTHER; note = 2'-O-methyluridine-3'-phosphate
  modified_base 10: mod_base = OTHER; note = 2'-O-methylcytidine-3'-phosphate
  misc_feature 1..19: note = RNA
  misc_feature 20..21: note = DNA
tcttggttacatgaaatcctt

SEQ ID NO: 1415 - DNA, 21 bp, synthetic construct
  source 1..21: mol_type = other DNA; note = Description of Artificial Sequence: Synthetic primer
cattcttggcaggatggcttc

SEQ ID NO: 1416 - DNA, 20 bp, synthetic construct
  source 1..20: mol_type = other DNA; note = Description of Artificial Sequence: Synthetic primer
ctcccaggtgtcatcagcag

SEQ ID NO: 1417 - DNA, 22 bp, synthetic construct
  source 1..22: mol_type = other DNA; note = Description of Artificial Sequence: Synthetic primer
tgcctcgctggactgatatttg

SEQ ID NO: 1418 - DNA, 21 bp, synthetic construct
  source 1..21: mol_type = other DNA; note = Description of Artificial Sequence: Synthetic primer
ttgaacactttcacggccaca

SEQ ID NO: 1419 - DNA, 18 bp, synthetic construct
  source 1..18: mol_type = other DNA; note = Description of Artificial Sequence: Synthetic primer
gccgtgcatgtgttcaga

SEQ ID NO: 1420 - DNA, 22 bp, synthetic construct
  source 1..22: mol_type = other DNA; note = Description of Artificial Sequence: Synthetic primer
gctctccagactcactggtttt

SEQ ID NO: 1421 - DNA, 21 bp, synthetic construct
  source 1..21: mol_type = other DNA; note = Description of Artificial Sequence: Synthetic oligonucleotide; note = Description of Combined DNA/RNA Molecule: Synthetic oligonucleotide
  modified_base 1: mod_base = OTHER; note = 2'-O-methylcytidine-3'-phosphate
  modified_base 4: mod_base = OTHER; note = 2'-O-methyluridine-3'-phosphate
  modified_base 6: mod_base = OTHER; note = 2'-O-methyluridine-3'-phosphate
  modified_base 7: mod_base = OTHER; note = 2'-O-methyluridine-3'-phosphate
  modified_base 8: mod_base = OTHER; note = 2'-O-methylcytidine-3'-phosphate
  modified_base 9: mod_base = OTHER; note = 2'-O-methyluridine-3'-phosphate
  modified_base 10: mod_base = OTHER; note = 2'-O-methyluridine-3'-phosphate
  modified_base 12: mod_base = OTHER; note = 2'-O-methylcytidine-3'-phosphate
  modified_base 13: mod_base = OTHER; note = 2'-O-methyluridine-3'-phosphate
  modified_base 14: mod_base = OTHER; note = 2'-O-methylcytidine-3'-phosphate
  modified_base 15: mod_base = OTHER; note = 2'-O-methyluridine-3'-phosphate
  modified_base 17: mod_base = OTHER; note = 2'-O-methyluridine-3'-phosphate
  modified_base 21: mod_base = OTHER; note = 2'-deoxythymidine-3'-phosphorothioate N-(cholesterylcarboxamidocaproyl)-4-hydroxyprolinol (Hyp-C6-Chol)
  misc_feature 1..19: note = RNA
  misc_feature 20..21: note = DNA
cagtgttcttgctctataatt

SEQ ID NO: 1422 - DNA, 21 bp, synthetic construct
  source 1..21: mol_type = other DNA; note = Description of Artificial Sequence: Synthetic oligonucleotide; note = Description of Combined DNA/RNA Molecule: Synthetic oligonucleotide
  modified_base 2: mod_base = OTHER; note = 2'-O-methyluridine-3'-phosphate
  modified_base 4: mod_base = OTHER; note = 2'-O-methyluridine-3'-phosphate
  modified_base 9: mod_base = OTHER; note = 2'-O-methylcytidine-3'-phosphate
  modified_base 15: mod_base = OTHER; note = 2'-O-methylcytidine-3'-phosphate
  misc_feature 1..19: note = RNA
  misc_feature 20..21: note = DNA
ttatagagcaagaacactgtt

SEQ ID NO: 1423 - DNA, 22 bp, synthetic construct
  source 1..22: mol_type = other DNA; note = Description of Artificial Sequence: Synthetic primer
tgcctcgctggactgatatttg

SEQ ID NO: 1424 - DNA, 21 bp, synthetic construct
  source 1..21: mol_type = other DNA; note = Description of Artificial Sequence: Synthetic primer
ttgaacactttcacggccaca

We claim:

1. A method for reducing TTR expression in a retinal pigment epithelium of a subject comprising administering a sufficient amount of a dsRNA to the retina of the subject, wherein the dsRNA targets TTR.

2. The method of claim 1, wherein the dsRNA is conjugated to a cholesterol molecule.

3. The method of claim 1, wherein the subject is a human.

4. The method of claim 3, wherein the subject is a human in need of treatment for TTR-related ocular amyloidosis.

5. The method of claim 3, wherein the subject is a human comprising a V30M TTR gene.

6. The method of claim 3, wherein the dsRNA is AD-18324.

7. The method of claim 3, wherein TTR expression is reduced in the retinal pigment epithelium (RPE).

8. The method of claim 3, wherein TTR mRNA expression is reduced by at least 40% or by at least 60% compared to a control.

9. The method of claim 3, wherein administration does not result in an inflammatory response as measured by IL-6 or TNF-alpha levels.

10. The method of claim 1, wherein the subject is a transgenic rat possessing a human ATTR V30M gene.

11. The method of claim 10, wherein the dsRNA is AD-18324.

12. The method of claim 10, wherein TTR expression is reduced in the retinal pigment epithelium (RPE) of the transgenic rat.

13. The method of claim 10, wherein TTR mRNA expression is reduced by at least 60% compared to a control.

14. The method of claim 10, wherein administration does not result in an inflammatory response as measured by IL-6 or TNF-alpha levels.

15. A method for inhibiting TTR expression in a retinal epithelium cell, the method comprising:
(a) introducing into the retinal epithelium cell a dsRNA, wherein the dsRNA targets TTR; and
(b) maintaining the cell produced in step (a) for a time sufficient to obtain degradation of the mRNA transcript of a TTR gene, thereby inhibiting expression of the TTR gene in the cell.

16. The method of claim 15, wherein the TTR is human TTR and the dsRNA is AD-18324.

17. The method of claim 15, wherein the retinal epithelium cell is a human retinal pigment epithelium transgenic cell.

18. The method of claim 15, wherein TTR expression is inhibited by at least 10%, 40%, or at least 60%.

19. The method of claim 15, wherein introducing the dsRNA does not result in an inflammatory response as measured by IL-6 or TNF-alpha levels.

20. The method of claim 15, wherein the method comprises the steps of transfecting APRE-19 cells with AD-18324 and incubating the transfected cells for 48 hours and further comprises isolating total RNA from the transfected cells and amplifying TTR mRNA using real-time quantitative PCR.
